United States Patent Application Publication US 2026/0366017 A1, published November 19, 2026 (application 19/711,632).

The application's sequence listing, which the Patent Office published only in electronic form, follows.

SEQUENCE LISTING (692 sequences)

SEQ ID NO: 1 - protein, 167 aa, Escherichia coli
  REGION 1..167: note = misc_feature - TadA*7.10 (ecTadA) polypeptide sequence
MSEVEFSHEYWMRHALTLAKRARDEREVPVGAVLVLNNRVIGEGWNRAIGLHDPTAHAEIMALRQGGLVMQNYRLIDATLYVTFEPCVMCAGAMIHSRIGRVVFGVRNAKTGAAGSLMDVLHYPGMNHRVEITEGILADECAALLCYFFRMPRQVFNAQKKAQSSTD

SEQ ID NO: 2 - DNA, 4092 bp, synthetic construct
  misc_feature 1..4092: note = BhCas12b GGSGGS-ABE8-Xten20at P153 polynucleotide sequence
  misc_feature 1..6: note = Kozak sequence
  misc_feature 7..57: note = Sequence encoding N-terminal nuclear localization signal
  misc_feature 58..513: note = Sequence encoding BhCas12b
  misc_feature 514..531: note = Sequence encoding a linker
  misc_feature 532..1029: note = Sequence encoding TadA*8
  misc_feature 1030..1089: note = Sequence encoding Xten20 linker
  misc_feature 1090..3954: note = Sequence encoding BhCas12b
  misc_feature 3955..4002: note = Sequence encoding C-terminal NLS
  misc_feature 4003..4008: note = Sequence encoding GS linker
  misc_feature 4009..4089: note = Sequence encoding 3x hemagglutinin (HA) tag
  source 1..4092: mol_type = other DNA
gccaccatggccccaaagaagaagcggaaggtcggtatccacggagtcccagcagccgccaccagatccttcatcctgaagatcgagcccaacgaggaagtgaagaaaggcctctggaaaacccacgaggtgctgaaccacggaatcgcctactacatgaatatcctgaagctgatccggcaagaggccatctacgagcaccacgagcaggaccccaagaatcccaagaaggtgtccaaggccgagatccaggccgagctgtgggatttcgtgctgaagatgcagaagtgcaacagcttcacacacgaggtggacaaggacgaggtgttcaacatcctgagagagctgtacgaggaactggtgcccagcagcgtggaaaagaagggcgaagccaaccagctgagcaacaagtttctgtaccctctggtggaccccaacagccagtctggaaagggaacagccagcagcggcagaaagcccagatggtacaacctgaagattgccggcgatcccggaggctctggaggaagctccgaagtcgagttttcccatgagtactggatgagacacgcattgactctcgcaaagagggctcgagatgaacgcgaggtgcccgtgggggcagtactcgtgctcaacaatcgcgtaatcggcgaaggttggaatagggcaatcggactccacgaccccactgcacatgcggaaatcatggcccttcgacagggagggcttgtgatgcagaattatcgactttatgatgcgacgctgtacgtcacgtttgaaccttgcgtaatgtgcgcgggagctatgattcactcccgcattggacgagttgtattcggtgttcgcaacgccaagacgggtgccgcaggttcactgatggacgtgctgcatcatccaggcatgaaccaccgggtagaaatcacagaaggcatattggcggacgaatgtgcggcgctgttgtgtcgtttttttcgcatgcccaggcgggtctttaacgcccagaaaaaagcacaatcctctactgacggctcttctggatctgaaacacctggcacaagcgagagcgccacccctgagagctctggctcctgggaagaagagaagaagaagtgggaagaagataagaaaaaggacccgctggccaagatcctgggcaagctggctgagtacggactgatccctctgttcatcccctacaccgacagcaacgagcccatcgtgaaagaaatcaagtggatggaaaagtcccggaaccagagcgtgcggcggctggataaggacatgttcattcaggccctggaacggttcctgagctgggagagctggaacctgaaagtgaaagaggaatacgagaaggtcgagaaagagtacaagaccctggaagagaggatcaaagaggacatccaggctctgaaggctctggaacagtatgagaaagagcggcaagaacagctgctgcgggacaccctgaacaccaacgagtaccggctgagcaagagaggccttagaggctggcgggaaatcatccagaaatggctgaaaatggacgagaacgagccctccgagaagtacctggaagtgttcaaggactaccagcggaagcaccctagagaggccggcgattacagcgtgtacgagttcctgtccaagaaagagaaccacttcatctggcggaatcaccctgagtacccctacctgtacgccaccttctgcgagatcgacaagaaaaagaaggacgccaagcagcaggccaccttcacactggccgatcctatcaatcaccctctgtgggtccgattcgaggaaagaagcggcagcaacctgaacaagtacagaatcctgaccgagcagctgcacaccgagaagctgaagaaaaagctgacagtgcagctggaccggctgatctaccctacagaatctggcggctgggaagagaagggcaaagtggacattgtgctgctgcccagccggcagttctacaaccagatcttcctggacatcgaggaaaagggcaagcacgccttcacctacaaggatgagagcatcaagttccctctgaagggcacactcggcggagccagagtgcagttcgacagagatcacctgagaagataccctcacaaggtggaaagcggcaacgtgggcagaatctacttcaacatgaccgtgaacatcgagcctacagagtccccagtgtccaagtctctgaagatccaccgggacgacttccccaaggtggtcaacttcaagcccaaagaactgaccgagtggatcaaggacagcaagggcaagaaactgaagtccggcatcgagtccctggaaatcggcctgagagtgatgagcatcgacctgggacagagacaggccgctgccgcctctattttcgaggtggtggatcagaagcccgacatcgaaggcaagctgtttttcccaatcaagggcaccgagctgtatgccgtgcacagagccagcttcaacatcaagctgcccggcgagacactggtcaagagcagagaagtgctgcggaaggccagagaggacaatctgaaactgatgaaccagaagctcaacttcctgcggaacgtgctgcacttccagcagttcgaggacatcaccgagagagagaagcgggtcaccaagtggatcagcagacaagagaacagcgacgtgcccctggtgtaccaggatgagctgatccagatccgcgagctgatgtacaagccttacaaggactgggtcgccttcctgaagcagctccacaagagactggaagtcgagatcggcaaagaagtgaagcactggcggaagtccctgagcgacggaagaaagggcctgtacggcatctccctgaagaacatcgacgagatcgatcggacccggaagttcctgctgagatggtccctgaggcctaccgaacctggcgaagtgcgtagactggaacccggccagagattcgccatcgaccagctgaatcacctgaacgccctgaaagaagatcggctgaagaagatggccaacaccatcatcatgcacgccctgggctactgctacgacgtgcggaagaagaaatggcaggctaagaaccccgcctgccagatcatcctgttcgaggatctgagcaactacaacccctacgaggaaaggtcccgcttcgagaacagcaagctcatgaagtggtccagacgcgagatccccagacaggttgcactgcagggcgagatctatggcctgcaagtgggagaagtgggcgctcagttcagcagcagattccacgccaagacaggcagccctggcatcagatgtagcgtcgtgaccaaagagaagctgcaggacaatcggttcttcaagaatctgcagagagagggcagactgaccctggacaaaatcgccgtgctgaaagagggcgatctgtacccagacaaaggcggcgagaagttcatcagcctgagcaaggatcggaagtgcgtgaccacacacgccgacatcaacgccgctcagaacctgcagaagcggttctggacaagaacccacggcttctacaaggtgtactgcaaggcctaccaggtggacggccagaccgtgtacatccctgagagcaaggaccagaagcagaagatcatcgaagagttcggcgagggctacttcattctgaaggacggggtgtacgaatgggtcaacgccggcaagctgaaaatcaagaagggcagctccaagcagagcagcagcgagctggtggatagcgacatcctgaaagacagcttcgacctggcctccgagctgaaaggcgaaaagctgatgctgtacagggaccccagcggcaatgtgttccccagcgacaaatggatggccgctggcgtgttcttcggaaagctggaacgcatcctgatcagcaagctgaccaaccagtactccatcagcaccatcgaggacgacagcagcaagcagtctatgaaaaggccggcggccacgaaaaaggccggccaggcaaaaaagaaaaagggatcctacccatacgatgttccagattacgcttatccctacgacgtgcctgattatgcatacccatatgatgtccccgactatgcctaa

SEQ ID NO: 3 - protein, 1361 aa, synthetic construct
  REGION 1..1361: note = BhCas12b GGSGGS-ABE8-Xten20at P153 polypeptide sequence
MAPKKKRKVGIHGVPAAATRSFILKIEPNEEVKKGLWKTHEVLNHGIAYYMNILKLIRQEAIYEHHEQDPKNPKKVSKAEIQAELWDFVLKMQKCNSFTHEVDKDEVFNILRELYEELVPSSVEKKGEANQLSNKFLYPLVDPNSQSGKGTASSGRKPRWYNLKIAGDPGGSGGSSEVEFSHEYWMRHALTLAKRARDEREVPVGAVLVLNNRVIGEGWNRAIGLHDPTAHAEIMALRQGGLVMQNYRLYDATLYVTFEPCVMCAGAMIHSRIGRVVFGVRNAKTGAAGSLMDVLHHPGMNHRVEITEGILADECAALLCRFFRMPRRVFNAQKKAQSSTDGSSGSETPGTSESATPESSGSWEEEKKKWEEDKKKDPLAKILGKLAEYGLIPLFIPYTDSNEPIVKEIKWMEKSRNQSVRRLDKDMFIQALERFLSWESWNLKVKEEYEKVEKEYKTLEERIKEDIQALKALEQYEKERQEQLLRDTLNTNEYRLSKRGLRGWREIIQKWLKMDENEPSEKYLEVFKDYQRKHPREAGDYSVYEFLSKKENHFIWRNHPEYPYLYATFCEIDKKKKDAKQQATFTLADPINHPLWVRFEERSGSNLNKYRILTEQLHTEKLKKKLTVQLDRLIYPTESGGWEEKGKVDIVLLPSRQFYNQIFLDIEEKGKHAFTYKDESIKFPLKGTLGGARVQFDRDHLRRYPHKVESGNVGRIYFNMTVNIEPTESPVSKSLKIHRDDFPKVVNFKPKELTEWIKDSKGKKLKSGIESLEIGLRVMSIDLGQRQAAAASIFEVVDQKPDIEGKLFFPIKGTELYAVHRASFNIKLPGETLVKSREVLRKAREDNLKLMNQKLNFLRNVLHFQQFEDITEREKRVTKWISRQENSDVPLVYQDELIQIRELMYKPYKDWVAFLKQLHKRLEVEIGKEVKHWRKSLSDGRKGLYGISLKNIDEIDRTRKFLLRWSLRPTEPGEVRRLEPGQRFAIDQLNHLNALKEDRLKKMANTIIMHALGYCYDVRKKKWQAKNPACQIILFEDLSNYNPYEERSRFENSKLMKWSRREIPRQVALQGEIYGLQVGEVGAQFSSRFHAKTGSPGIRCSVVTKEKLQDNRFFKNLQREGRLTLDKIAVLKEGDLYPDKGGEKFISLSKDRKCVTTHADINAAQNLQKRFWTRTHGFYKVYCKAYQVDGQTVYIPESKDQKQKIIEEFGEGYFILKDGVYEWVNAGKLKIKKGSSKQSSSELVDSDILKDSFDLASELKGEKLMLYRDPSGNVFPSDKWMAAGVFFGKLERILISKLTNQYSISTIEDDSSKQSMKRPAATKKAGQAKKKKGSYPYDVPDYAYPYDVPDYAYPYDVPDYA

SEQ ID NO: 4 - DNA, 4092 bp, synthetic construct
  misc_feature 1..4092: note = BhCas12b GGSGGS-ABE8-Xten20at K255 polynucleotide sequence
  misc_feature 1..6: note = Kozak sequence
  misc_feature 7..57: note = Sequence encoding N-terminal nuclear localization signal (NLS)
  misc_feature 58..822: note = Sequence encoding BhCas12b
  misc_feature 823..840: note = Sequence encoding a linker
  misc_feature 841..1338: note = Sequence encoding TadA*8
  misc_feature 1339..1398: note = Sequence encoding Xten20 linker
  misc_feature 1399..3954: note = Sequence encoding BhCas12b
  misc_feature 3955..4002: note = Sequence encoding C-terminal NLS
  misc_feature 4003..4008: note = Sequence encoding a GS linker
  misc_feature 4009..4089: note = Sequence encoding 3x hemagglutinin (HA) tag
  source 1..4092: mol_type = other DNA
gccaccatggccccaaagaagaagcggaaggtcggtatccacggagtcccagcagccgccaccagatccttcatcctgaagatcgagcccaacgaggaagtgaagaaaggcctctggaaaacccacgaggtgctgaaccacggaatcgcctactacatgaatatcctgaagctgatccggcaagaggccatctacgagcaccacgagcaggaccccaagaatcccaagaaggtgtccaaggccgagatccaggccgagctgtgggatttcgtgctgaagatgcagaagtgcaacagcttcacacacgaggtggacaaggacgaggtgttcaacatcctgagagagctgtacgaggaactggtgcccagcagcgtggaaaagaagggcgaagccaaccagctgagcaacaagtttctgtaccctctggtggaccccaacagccagtctggaaagggaacagccagcagcggcagaaagcccagatggtacaacctgaagattgccggcgatccctcctgggaagaagagaagaagaagtgggaagaagataagaaaaaggacccgctggccaagatcctgggcaagctggctgagtacggactgatccctctgttcatcccctacaccgacagcaacgagcccatcgtgaaagaaatcaagtggatggaaaagtcccggaaccagagcgtgcggcggctggataaggacatgttcattcaggccctggaacggttcctgagctgggagagctggaacctgaaagtgaaagaggaatacgagaaggtcgagaaagagtacaagaccctggaagagaggatcaaaggaggctctggaggaagctccgaagtcgagttttcccatgagtactggatgagacacgcattgactctcgcaaagagggctcgagatgaacgcgaggtgcccgtgggggcagtactcgtgctcaacaatcgcgtaatcggcgaaggttggaatagggcaatcggactccacgaccccactgcacatgcggaaatcatggcccttcgacagggagggcttgtgatgcagaattatcgactttatgatgcgacgctgtacgtcacgtttgaaccttgcgtaatgtgcgcgggagctatgattcactcccgcattggacgagttgtattcggtgttcgcaacgccaagacgggtgccgcaggttcactgatggacgtgctgcatcatccaggcatgaaccaccgggtagaaatcacagaaggcatattggcggacgaatgtgcggcgctgttgtgtcgtttttttcgcatgcccaggcgggtctttaacgcccagaaaaaagcacaatcctctactgacggctcttctggatctgaaacacctggcacaagcgagagcgccacccctgagagctctggcgaggacatccaggctctgaaggctctggaacagtatgagaaagagcggcaagaacagctgctgcgggacaccctgaacaccaacgagtaccggctgagcaagagaggccttagaggctggcgggaaatcatccagaaatggctgaaaatggacgagaacgagccctccgagaagtacctggaagtgttcaaggactaccagcggaagcaccctagagaggccggcgattacagcgtgtacgagttcctgtccaagaaagagaaccacttcatctggcggaatcaccctgagtacccctacctgtacgccaccttctgcgagatcgacaagaaaaagaaggacgccaagcagcaggccaccttcacactggccgatcctatcaatcaccctctgtgggtccgattcgaggaaagaagcggcagcaacctgaacaagtacagaatcctgaccgagcagctgcacaccgagaagctgaagaaaaagctgacagtgcagctggaccggctgatctaccctacagaatctggcggctgggaagagaagggcaaagtggacattgtgctgctgcccagccggcagttctacaaccagatcttcctggacatcgaggaaaagggcaagcacgccttcacctacaaggatgagagcatcaagttccctctgaagggcacactcggcggagccagagtgcagttcgacagagatcacctgagaagataccctcacaaggtggaaagcggcaacgtgggcagaatctacttcaacatgaccgtgaacatcgagcctacagagtccccagtgtccaagtctctgaagatccaccgggacgacttccccaaggtggtcaacttcaagcccaaagaactgaccgagtggatcaaggacagcaagggcaagaaactgaagtccggcatcgagtccctggaaatcggcctgagagtgatgagcatcgacctgggacagagacaggccgctgccgcctctattttcgaggtggtggatcagaagcccgacatcgaaggcaagctgtttttcccaatcaagggcaccgagctgtatgccgtgcacagagccagcttcaacatcaagctgcccggcgagacactggtcaagagcagagaagtgctgcggaaggccagagaggacaatctgaaactgatgaaccagaagctcaacttcctgcggaacgtgctgcacttccagcagttcgaggacatcaccgagagagagaagcgggtcaccaagtggatcagcagacaagagaacagcgacgtgcccctggtgtaccaggatgagctgatccagatccgcgagctgatgtacaagccttacaaggactgggtcgccttcctgaagcagctccacaagagactggaagtcgagatcggcaaagaagtgaagcactggcggaagtccctgagcgacggaagaaagggcctgtacggcatctccctgaagaacatcgacgagatcgatcggacccggaagttcctgctgagatggtccctgaggcctaccgaacctggcgaagtgcgtagactggaacccggccagagattcgccatcgaccagctgaatcacctgaacgccctgaaagaagatcggctgaagaagatggccaacaccatcatcatgcacgccctgggctactgctacgacgtgcggaagaagaaatggcaggctaagaaccccgcctgccagatcatcctgttcgaggatctgagcaactacaacccctacgaggaaaggtcccgcttcgagaacagcaagctcatgaagtggtccagacgcgagatccccagacaggttgcactgcagggcgagatctatggcctgcaagtgggagaagtgggcgctcagttcagcagcagattccacgccaagacaggcagccctggcatcagatgtagcgtcgtgaccaaagagaagctgcaggacaatcggttcttcaagaatctgcagagagagggcagactgaccctggacaaaatcgccgtgctgaaagagggcgatctgtacccagacaaaggcggcgagaagttcatcagcctgagcaaggatcggaagtgcgtgaccacacacgccgacatcaacgccgctcagaacctgcagaagcggttctggacaagaacccacggcttctacaaggtgtactgcaaggcctaccaggtggacggccagaccgtgtacatccctgagagcaaggaccagaagcagaagatcatcgaagagttcggcgagggctacttcattctgaaggacggggtgtacgaatgggtcaacgccggcaagctgaaaatcaagaagggcagctccaagcagagcagcagcgagctggtggatagcgacatcctgaaagacagcttcgacctggcctccgagctgaaaggcgaaaagctgatgctgtacagggaccccagcggcaatgtgttccccagcgacaaatggatggccgctggcgtgttcttcggaaagctggaacgcatcctgatcagcaagctgaccaaccagtactccatcagcaccatcgaggacgacagcagcaagcagtctatgaaaaggccggcggccacgaaaaaggccggccaggcaaaaaagaaaaagggatcctacccatacgatgttccagattacgcttatccctacgacgtgcctgattatgcatacccatatgatgtccccgactatgcctaa

SEQ ID NO: 5 - protein, 1361 aa, synthetic construct
  REGION 1..1361: note = BhCas12b GGSGGS-ABE8-Xten20at K255 polypeptide sequence
MAPKKKRKVGIHGVPAAATRSFILKIEPNEEVKKGLWKTHEVLNHGIAYYMNILKLIRQEAIYEHHEQDPKNPKKVSKAEIQAELWDFVLKMQKCNSFTHEVDKDEVFNILRELYEELVPSSVEKKGEANQLSNKFLYPLVDPNSQSGKGTASSGRKPRWYNLKIAGDPSWEEEKKKWEEDKKKDPLAKILGKLAEYGLIPLFIPYTDSNEPIVKEIKWMEKSRNQSVRRLDKDMFIQALERFLSWESWNLKVKEEYEKVEKEYKTLEERIKGGSGGSSEVEFSHEYWMRHALTLAKRARDEREVPVGAVLVLNNRVIGEGWNRAIGLHDPTAHAEIMALRQGGLVMQNYRLYDATLYVTFEPCVMCAGAMIHSRIGRVVFGVRNAKTGAAGSLMDVLHHPGMNHRVEITEGILADECAALLCRFFRMPRRVFNAQKKAQSSTDGSSGSETPGTSESATPESSGEDIQALKALEQYEKERQEQLLRDTLNTNEYRLSKRGLRGWREIIQKWLKMDENEPSEKYLEVFKDYQRKHPREAGDYSVYEFLSKKENHFIWRNHPEYPYLYATFCEIDKKKKDAKQQATFTLADPINHPLWVRFEERSGSNLNKYRILTEQLHTEKLKKKLTVQLDRLIYPTESGGWEEKGKVDIVLLPSRQFYNQIFLDIEEKGKHAFTYKDESIKFPLKGTLGGARVQFDRDHLRRYPHKVESGNVGRIYFNMTVNIEPTESPVSKSLKIHRDDFPKVVNFKPKELTEWIKDSKGKKLKSGIESLEIGLRVMSIDLGQRQAAAASIFEVVDQKPDIEGKLFFPIKGTELYAVHRASFNIKLPGETLVKSREVLRKAREDNLKLMNQKLNFLRNVLHFQQFEDITEREKRVTKWISRQENSDVPLVYQDELIQIRELMYKPYKDWVAFLKQLHKRLEVEIGKEVKHWRKSLSDGRKGLYGISLKNIDEIDRTRKFLLRWSLRPTEPGEVRRLEPGQRFAIDQLNHLNALKEDRLKKMANTIIMHALGYCYDVRKKKWQAKNPACQIILFEDLSNYNPYEERSRFENSKLMKWSRREIPRQVALQGEIYGLQVGEVGAQFSSRFHAKTGSPGIRCSVVTKEKLQDNRFFKNLQREGRLTLDKIAVLKEGDLYPDKGGEKFISLSKDRKCVTTHADINAAQNLQKRFWTRTHGFYKVYCKAYQVDGQTVYIPESKDQKQKIIEEFGEGYFILKDGVYEWVNAGKLKIKKGSSKQSSSELVDSDILKDSFDLASELKGEKLMLYRDPSGNVFPSDKWMAAGVFFGKLERILISKLTNQYSISTIEDDSSKQSMKRPAATKKAGQAKKKKGSYPYDVPDYAYPYDVPDYAYPYDVPDYA

SEQ ID NO: 6 - DNA, 4092 bp, synthetic construct
  misc_feature 1..4092: note = BhCas12b GGSGGS-ABE8-Xten20at D306 polynucleotide sequence
  misc_feature 1..6: note = Kozak sequence
  misc_feature 7..57: note = Sequence encoding N-terminal nuclear localization signal (NLS)
  misc_feature 58..975: note = Sequence encoding BhCas12b
  misc_feature 976..993: note = Sequence encoding a linker
  misc_feature 994..1491: note = Sequence encoding TadA*8
  misc_feature 1492..1551: note = Sequence encoding Xten20 linker
  misc_feature 1552..3954: note = Sequence encoding BhCas12b
  misc_feature 3955..4002: note = Sequence encoding C-terminal NLS
  misc_feature 4003..4008: note = Sequence encoding a GS linker
  misc_feature 4009..4089: note = Sequence encoding 3x hemagglutinin (HA) tag
  source 1..4092: mol_type = other DNA
gccaccatggccccaaagaagaagcggaaggtcggtatccacggagtcccagcagccgccaccagatccttcatcctgaagatcgagcccaacgaggaagtgaagaaaggcctctggaaaacccacgaggtgctgaaccacggaatcgcctactacatgaatatcctgaagctgatccggcaagaggccatctacgagcaccacgagcaggaccccaagaatcccaagaaggtgtccaaggccgagatccaggccgagctgtgggatttcgtgctgaagatgcagaagtgcaacagcttcacacacgaggtggacaaggacgaggtgttcaacatcctgagagagctgtacgaggaactggtgcccagcagcgtggaaaagaagggcgaagccaaccagctgagcaacaagtttctgtaccctctggtggaccccaacagccagtctggaaagggaacagccagcagcggcagaaagcccagatggtacaacctgaagattgccggcgatccctcctgggaagaagagaagaagaagtgggaagaagataagaaaaaggacccgctggccaagatcctgggcaagctggctgagtacggactgatccctctgttcatcccctacaccgacagcaacgagcccatcgtgaaagaaatcaagtggatggaaaagtcccggaaccagagcgtgcggcggctggataaggacatgttcattcaggccctggaacggttcctgagctgggagagctggaacctgaaagtgaaagaggaatacgagaaggtcgagaaagagtacaagaccctggaagagaggatcaaagaggacatccaggctctgaaggctctggaacagtatgagaaagagcggcaagaacagctgctgcgggacaccctgaacaccaacgagtaccggctgagcaagagaggccttagaggctggcgggaaatcatccagaaatggctgaaaatggacggaggctctggaggaagctccgaagtcgagttttcccatgagtactggatgagacacgcattgactctcgcaaagagggctcgagatgaacgcgaggtgcccgtgggggcagtactcgtgctcaacaatcgcgtaatcggcgaaggttggaatagggcaatcggactccacgaccccactgcacatgcggaaatcatggcccttcgacagggagggcttgtgatgcagaattatcgactttatgatgcgacgctgtacgtcacgtttgaaccttgcgtaatgtgcgcgggagctatgattcactcccgcattggacgagttgtattcggtgttcgcaacgccaagacgggtgccgcaggttcactgatggacgtgctgcatcatccaggcatgaaccaccgggtagaaatcacagaaggcatattggcggacgaatgtgcggcgctgttgtgtcgtttttttcgcatgcccaggcgggtctttaacgcccagaaaaaagcacaatcctctactgacggctcttctggatctgaaacacctggcacaagcgagagcgccacccctgagagctctggcgagaacgagccctccgagaagtacctggaagtgttcaaggactaccagcggaagcaccctagagaggccggcgattacagcgtgtacgagttcctgtccaagaaagagaaccacttcatctggcggaatcaccctgagtacccctacctgtacgccaccttctgcgagatcgacaagaaaaagaaggacgccaagcagcaggccaccttcacactggccgatcctatcaatcaccctctgtgggtccgattcgaggaaagaagcggcagcaacctgaacaagtacagaatcctgaccgagcagctgcacaccgagaagctgaagaaaaagctgacagtgcagctggaccggctgatctaccctacagaatctggcggctgggaagagaagggcaaagtggacattgtgctgctgcccagccggcagttctacaaccagatcttcctggacatcgaggaaaagggcaagcacgccttcacctacaaggatgagagcatcaagttccctctgaagggcacactcggcggagccagagtgcagttcgacagagatcacctgagaagataccctcacaaggtggaaagcggcaacgtgggcagaatctacttcaacatgaccgtgaacatcgagcctacagagtccccagtgtccaagtctctgaagatccaccgggacgacttccccaaggtggtcaacttcaagcccaaagaactgaccgagtggatcaaggacagcaagggcaagaaactgaagtccggcatcgagtccctggaaatcggcctgagagtgatgagcatcgacctgggacagagacaggccgctgccgcctctattttcgaggtggtggatcagaagcccgacatcgaaggcaagctgtttttcccaatcaagggcaccgagctgtatgccgtgcacagagccagcttcaacatcaagctgcccggcgagacactggtcaagagcagagaagtgctgcggaaggccagagaggacaatctgaaactgatgaaccagaagctcaacttcctgcggaacgtgctgcacttccagcagttcgaggacatcaccgagagagagaagcgggtcaccaagtggatcagcagacaagagaacagcgacgtgcccctggtgtaccaggatgagctgatccagatccgcgagctgatgtacaagccttacaaggactgggtcgccttcctgaagcagctccacaagagactggaagtcgagatcggcaaagaagtgaagcactggcggaagtccctgagcgacggaagaaagggcctgtacggcatctccctgaagaacatcgacgagatcgatcggacccggaagttcctgctgagatggtccctgaggcctaccgaacctggcgaagtgcgtagactggaacccggccagagattcgccatcgaccagctgaatcacctgaacgccctgaaagaagatcggctgaagaagatggccaacaccatcatcatgcacgccctgggctactgctacgacgtgcggaagaagaaatggcaggctaagaaccccgcctgccagatcatcctgttcgaggatctgagcaactacaacccctacgaggaaaggtcccgcttcgagaacagcaagctcatgaagtggtccagacgcgagatccccagacaggttgcactgcagggcgagatctatggcctgcaagtgggagaagtgggcgctcagttcagcagcagattccacgccaagacaggcagccctggcatcagatgtagcgtcgtgaccaaagagaagctgcaggacaatcggttcttcaagaatctgcagagagagggcagactgaccctggacaaaatcgccgtgctgaaagagggcgatctgtacccagacaaaggcggcgagaagttcatcagcctgagcaaggatcggaagtgcgtgaccacacacgccgacatcaacgccgctcagaacctgcagaagcggttctggacaagaacccacggcttctacaaggtgtactgcaaggcctaccaggtggacggccagaccgtgtacatccctgagagcaaggaccagaagcagaagatcatcgaagagttcggcgagggctacttcattctgaaggacggggtgtacgaatgggtcaacgccggcaagctgaaaatcaagaagggcagctccaagcagagcagcagcgagctggtggatagcgacatcctgaaagacagcttcgacctggcctccgagctgaaaggcgaaaagctgatgctgtacagggaccccagcggcaatgtgttccccagcgacaaatggatggccgctggcgtgttcttcggaaagctggaacgcatcctgatcagcaagctgaccaaccagtactccatcagcaccatcgaggacgacagcagcaagcagtctatgaaaaggccggcggccacgaaaaaggccggccaggcaaaaaagaaaaagggatcctacccatacgatgttccagattacgcttatccctacgacgtgcctgattatgcatacccatatgatgtccccgactatgcctaa

SEQ ID NO: 7 - protein, 1361 aa, synthetic construct
  REGION 1..1361: note = BhCas12b GGSGGS-ABE8-Xten20at D306 polypeptide sequence
MAPKKKRKVGIHGVPAAATRSFILKIEPNEEVKKGLWKTHEVLNHGIAYYMNILKLIRQEAIYEHHEQDPKNPKKVSKAEIQAELWDFVLKMQKCNSFTHEVDKDEVFNILRELYEELVPSSVEKKGEANQLSNKFLYPLVDPNSQSGKGTASSGRKPRWYNLKIAGDPSWEEEKKKWEEDKKKDPLAKILGKLAEYGLIPLFIPYTDSNEPIVKEIKWMEKSRNQSVRRLDKDMFIQALERFLSWESWNLKVKEEYEKVEKEYKTLEERIKEDIQALKALEQYEKERQEQLLRDTLNTNEYRLSKRGLRGWREIIQKWLKMDGGSGGSSEVEFSHEYWMRHALTLAKRARDEREVPVGAVLVLNNRVIGEGWNRAIGLHDPTAHAEIMALRQGGLVMQNYRLYDATLYVTFEPCVMCAGAMIHSRIGRVVFGVRNAKTGAAGSLMDVLHHPGMNHRVEITEGILADECAALLCRFFRMPRRVFNAQKKAQSSTDGSSGSETPGTSESATPESSGENEPSEKYLEVFKDYQRKHPREAGDYSVYEFLSKKENHFIWRNHPEYPYLYATFCEIDKKKKDAKQQATFTLADPINHPLWVRFEERSGSNLNKYRILTEQLHTEKLKKKLTVQLDRLIYPTESGGWEEKGKVDIVLLPSRQFYNQIFLDIEEKGKHAFTYKDESIKFPLKGTLGGARVQFDRDHLRRYPHKVESGNVGRIYFNMTVNIEPTESPVSKSLKIHRDDFPKVVNFKPKELTEWIKDSKGKKLKSGIESLEIGLRVMSIDLGQRQAAAASIFEVVDQKPDIEGKLFFPIKGTELYAVHRASFNIKLPGETLVKSREVLRKAREDNLKLMNQKLNFLRNVLHFQQFEDITEREKRVTKWISRQENSDVPLVYQDELIQIRELMYKPYKDWVAFLKQLHKRLEVEIGKEVKHWRKSLSDGRKGLYGISLKNIDEIDRTRKFLLRWSLRPTEPGEVRRLEPGQRFAIDQLNHLNALKEDRLKKMANTIIMHALGYCYDVRKKKWQAKNPACQIILFEDLSNYNPYEERSRFENSKLMKWSRREIPRQVALQGEIYGLQVGEVGAQFSSRFHAKTGSPGIRCSVVTKEKLQDNRFFKNLQREGRLTLDKIAVLKEGDLYPDKGGEKFISLSKDRKCVTTHADINAAQNLQKRFWTRTHGFYKVYCKAYQVDGQTVYIPESKDQKQKIIEEFGEGYFILKDGVYEWVNAGKLKIKKGSSKQSSSELVDSDILKDSFDLASELKGEKLMLYRDPSGNVFPSDKWMAAGVFFGKLERILISKLTNQYSISTIEDDSSKQSMKRPAATKKAGQAKKKKGSYPYDVPDYAYPYDVPDYAYPYDVPDYA

SEQ ID NO: 8 - DNA, 4092 bp, synthetic construct
  misc_feature 1..4092: note = BhCas12b GGSGGS-ABE8-Xten20at D980 polynucleotide sequence
  misc_feature 1..6: note = Kozak sequence
  misc_feature 7..57: note = Sequence encoding N-terminal nuclear localization signal (NLS)
  misc_feature 58..2997: note = Sequence encoding BhCas12b
  misc_feature 2998..3015: note = Sequence encoding a linker
  misc_feature 3016..3513: note = Sequence encoding TadA*8
  misc_feature 3514..3573: note = Sequence encoding Xten20 linker
  misc_feature 3574..3954: note = Sequence encoding BhCas12b
  misc_feature 3955..4002: note = Sequence encoding C-terminal NLS
  misc_feature 4003..4008: note = Sequence encoding a GS linker
  misc_feature 4009..4089: note = Sequence encoding 3x hemagglutinin (HA) tag
  source 1..4092: mol_type = other DNA
gccaccatggccccaaagaagaagcggaaggtcggtatccacggagtcccagcagccgccaccagatccttcatcctgaagatcgagcccaacgaggaagtgaagaaaggcctctggaaaacccacgaggtgctgaaccacggaatcgcctactacatgaatatcctgaagctgatccggcaagaggccatctacgagcaccacgagcaggaccccaagaatcccaagaaggtgtccaaggccgagatccaggccgagctgtgggatttcgtgctgaagatgcagaagtgcaacagcttcacacacgaggtggacaaggacgaggtgttcaacatcctgagagagctgtacgaggaactggtgcccagcagcgtggaaaagaagggcgaagccaaccagctgagcaacaagtttctgtaccctctggtggaccccaacagccagtctggaaagggaacagccagcagcggcagaaagcccagatggtacaacctgaagattgccggcgatccctcctgggaagaagagaagaagaagtgggaagaagataagaaaaaggacccgctggccaagatcctgggcaagctggctgagtacggactgatccctctgttcatcccctacaccgacagcaacgagcccatcgtgaaagaaatcaagtggatggaaaagtcccggaaccagagcgtgcggcggctggataaggacatgttcattcaggccctggaacggttcctgagctgggagagctggaacctgaaagtgaaagaggaatacgagaaggtcgagaaagagtacaagaccctggaagagaggatcaaagaggacatccaggctctgaaggctctggaacagtatgagaaagagcggcaagaacagctgctgcgggacaccctgaacaccaacgagtaccggctgagcaagagaggccttagaggctggcgggaaatcatccagaaatggctgaaaatggacgagaacgagccctccgagaagtacctggaagtgttcaaggactaccagcggaagcaccctagagaggccggcgattacagcgtgtacgagttcctgtccaagaaagagaaccacttcatctggcggaatcaccctgagtacccctacctgtacgccaccttctgcgagatcgacaagaaaaagaaggacgccaagcagcaggccaccttcacactggccgatcctatcaatcaccctctgtgggtccgattcgaggaaagaagcggcagcaacctgaacaagtacagaatcctgaccgagcagctgcacaccgagaagctgaagaaaaagctgacagtgcagctggaccggctgatctaccctacagaatctggcggctgggaagagaagggcaaagtggacattgtgctgctgcccagccggcagttctacaaccagatcttcctggacatcgaggaaaagggcaagcacgccttcacctacaaggatgagagcatcaagttccctctgaagggcacactcggcggagccagagtgcagttcgacagagatcacctgagaagataccctcacaaggtggaaagcggcaacgtgggcagaatctacttcaacatgaccgtgaacatcgagcctacagagtccccagtgtccaagtctctgaagatccaccgggacgacttccccaaggtggtcaacttcaagcccaaagaactgaccgagtggatcaaggacagcaagggcaagaaactgaagtccggcatcgagtccctggaaatcggcctgagagtgatgagcatcgacctgggacagagacaggccgctgccgcctctattttcgaggtggtggatcagaagcccgacatcgaaggcaagctgtttttcccaatcaagggcaccgagctgtatgccgtgcacagagccagcttcaacatcaagctgcccggcgagacactggtcaagagcagagaagtgctgcggaaggccagagaggacaatctgaaactgatgaaccagaagctcaacttcctgcggaacgtgctgcacttccagcagttcgaggacatcaccgagagagagaagcgggtcaccaagtggatcagcagacaagagaacagcgacgtgcccctggtgtaccaggatgagctgatccagatccgcgagctgatgtacaagccttacaaggactgggtcgccttcctgaagcagctccacaagagactggaagtcgagatcggcaaagaagtgaagcactggcggaagtccctgagcgacggaagaaagggcctgtacggcatctccctgaagaacatcgacgagatcgatcggacccggaagttcctgctgagatggtccctgaggcctaccgaacctggcgaagtgcgtagactggaacccggccagagattcgccatcgaccagctgaatcacctgaacgccctgaaagaagatcggctgaagaagatggccaacaccatcatcatgcacgccctgggctactgctacgacgtgcggaagaagaaatggcaggctaagaaccccgcctgccagatcatcctgttcgaggatctgagcaactacaacccctacgaggaaaggtcccgcttcgagaacagcaagctcatgaagtggtccagacgcgagatccccagacaggttgcactgcagggcgagatctatggcctgcaagtgggagaagtgggcgctcagttcagcagcagattccacgccaagacaggcagccctggcatcagatgtagcgtcgtgaccaaagagaagctgcaggacaatcggttcttcaagaatctgcagagagagggcagactgaccctggacaaaatcgccgtgctgaaagagggcgatctgtacccagacaaaggcggcgagaagttcatcagcctgagcaaggatcggaagtgcgtgaccacacacgccgacatcaacgccgctcagaacctgcagaagcggttctggacaagaacccacggcttctacaaggtgtactgcaaggcctaccaggtggacggaggctctggaggaagctccgaagtcgagttttcccatgagtactggatgagacacgcattgactctcgcaaagagggctcgagatgaacgcgaggtgcccgtgggggcagtactcgtgctcaacaatcgcgtaatcggcgaaggttggaatagggcaatcggactccacgaccccactgcacatgcggaaatcatggcccttcgacagggagggcttgtgatgcagaattatcgactttatgatgcgacgctgtacgtcacgtttgaaccttgcgtaatgtgcgcgggagctatgattcactcccgcattggacgagttgtattcggtgttcgcaacgccaagacgggtgccgcaggttcactgatggacgtgctgcatcatccaggcatgaaccaccgggtagaaatcacagaaggcatattggcggacgaatgtgcggcgctgttgtgtcgtttttttcgcatgcccaggcgggtctttaacgcccagaaaaaagcacaatcctctactgacggctcttctggatctgaaacacctggcacaagcgagagcgccacccctgagagctctggcggccagaccgtgtacatccctgagagcaaggaccagaagcagaagatcatcgaagagttcggcgagggctacttcattctgaaggacggggtgtacgaatgggtcaacgccggcaagctgaaaatcaagaagggcagctccaagcagagcagcagcgagctggtggatagcgacatcctgaaagacagcttcgacctggcctccgagctgaaaggcgaaaagctgatgctgtacagggaccccagcggcaatgtgttccccagcgacaaatggatggccgctggcgtgttcttcggaaagctggaacgcatcctgatcagcaagctgaccaaccagtactccatcagcaccatcgaggacgacagcagcaagcagtctatgaaaaggccggcggccacgaaaaaggccggccaggcaaaaaagaaaaagggatcctacccatacgatgttccagattacgcttatccctacgacgtgcctgattatgcatacccatatgatgtccccgactatgcctaa

SEQ ID NO: 9 - protein, 1361 aa, synthetic construct
  REGION 1..1361: note = BhCas12b GGSGGS-ABE8-Xten20at D980 polypeptide sequence
MAPKKKRKVGIHGVPAAATRSFILKIEPNEEVKKGLWKTHEVLNHGIAYYMNILKLIRQEAIYEHHEQDPKNPKKVSKAEIQAELWDFVLKMQKCNSFTHEVDKDEVFNILRELYEELVPSSVEKKGEANQLSNKFLYPLVDPNSQSGKGTASSGRKPRWYNLKIAGDPSWEEEKKKWEEDKKKDPLAKILGKLAEYGLIPLFIPYTDSNEPIVKEIKWMEKSRNQSVRRLDKDMFIQALERFLSWESWNLKVKEEYEKVEKEYKTLEERIKEDIQALKALEQYEKERQEQLLRDTLNTNEYRLSKRGLRGWREIIQKWLKMDENEPSEKYLEVFKDYQRKHPREAGDYSVYEFLSKKENHFIWRNHPEYPYLYATFCEIDKKKKDAKQQATFTLADPINHPLWVRFEERSGSNLNKYRILTEQLHTEKLKKKLTVQLDRLIYPTESGGWEEKGKVDIVLLPSRQFYNQIFLDIEEKGKHAFTYKDESIKFPLKGTLGGARVQFDRDHLRRYPHKVESGNVGRIYFNMTVNIEPTESPVSKSLKIHRDDFPKVVNFKPKELTEWIKDSKGKKLKSGIESLEIGLRVMSIDLGQRQAAAASIFEVVDQKPDIEGKLFFPIKGTELYAVHRASFNIKLPGETLVKSREVLRKAREDNLKLMNQKLNFLRNVLHFQQFEDITEREKRVTKWISRQENSDVPLVYQDELIQIRELMYKPYKDWVAFLKQLHKRLEVEIGKEVKHWRKSLSDGRKGLYGISLKNIDEIDRTRKFLLRWSLRPTEPGEVRRLEPGQRFAIDQLNHLNALKEDRLKKMANTIIMHALGYCYDVRKKKWQAKNPACQIILFEDLSNYNPYEERSRFENSKLMKWSRREIPRQVALQGEIYGLQVGEVGAQFSSRFHAKTGSPGIRCSVVTKEKLQDNRFFKNLQREGRLTLDKIAVLKEGDLYPDKGGEKFISLSKDRKCVTTHADINAAQNLQKRFWTRTHGFYKVYCKAYQVDGGSGGSSEVEFSHEYWMRHALTLAKRARDEREVPVGAVLVLNNRVIGEGWNRAIGLHDPTAHAEIMALRQGGLVMQNYRLYDATLYVTFEPCVMCAGAMIHSRIGRVVFGVRNAKTGAAGSLMDVLHHPGMNHRVEITEGILADECAALLCRFFRMPRRVFNAQKKAQSSTDGSSGSETPGTSESATPESSGGQTVYIPESKDQKQKIIEEFGEGYFILKDGVYEWVNAGKLKIKKGSSKQSSSELVDSDILKDSFDLASELKGEKLMLYRDPSGNVFPSDKWMAAGVFFGKLERILISKLTNQYSISTIEDDSSKQSMKRPAATKKAGQAKKKKGSYPYDVPDYAYPYDVPDYAYPYDVPDYA

SEQ ID NO: 10 - DNA, 4092 bp, synthetic construct
  misc_feature 1..4092: note = BhCas12b GGSGGS-ABE8-Xten20at K1019 polynucleotide sequence
  misc_feature 1..6: note = Kozak sequence
  misc_feature 7..57: note = Sequence encoding N-terminal nuclear localization signal (NLS)
  misc_feature 58..3114: note = Sequence encoding BhCas12b
  misc_feature 3115..3132: note = Sequence encoding a linker
  misc_feature 3133..3630: note = Sequence encoding TadA*8
  misc_feature 3631..3690: note = Sequence encoding Xten20 linker
  misc_feature 3691..3954: note = Sequence encoding BhCas12b
  misc_feature 3955..4002: note = Sequence encoding C-terminal NLS
  misc_feature 4003..4008: note = Sequence encoding GS linker
  misc_feature 4009..4089: note = Sequence encoding 3x hemagglutinin (HA) tag
  source 1..4092: mol_type = other DNA
gccaccatggccccaaagaagaagcggaaggtcggtatccacggagtcccagcagccgccaccagatccttcatcctgaagatcgagcccaacgaggaagtgaagaaaggcctctggaaaacccacgaggtgctgaaccacggaatcgcctactacatgaatatcctgaagctgatccggcaagaggccatctacgagcaccacgagcaggaccccaagaatcccaagaaggtgtccaaggccgagatccaggccgagctgtgggatttcgtgctgaagatgcagaagtgcaacagcttcacacacgaggtggacaaggacgaggtgttcaacatcctgagagagctgtacgaggaactggtgcccagcagcgtggaaaagaagggcgaagccaaccagctgagcaacaagtttctgtaccctctggtggaccccaacagccagtctggaaagggaacagccagcagcggcagaaagcccagatggtacaacctgaagattgccggcgatccctcctgggaagaagagaagaagaagtgggaagaagataagaaaaaggacccgctggccaagatcctgggcaagctggctgagtacggactgatccctctgttcatcccctacaccgacagcaacgagcccatcgtgaaagaaatcaagtggatggaaaagtcccggaaccagagcgtgcggcggctggataaggacatgttcattcaggccctggaacggttcctgagctgggagagctggaacctgaaagtgaaagaggaatacgagaaggtcgagaaagagtacaagaccctggaagagaggatcaaagaggacatccaggctctgaaggctctggaacagtatgagaaagagcggcaagaacagctgctgcgggacaccctgaacaccaacgagtaccggctgagcaagagaggccttagaggctggcgggaaatcatccagaaatggctgaaaatggacgagaacgagccctccgagaagtacctggaagtgttcaaggactaccagcggaagcaccctagagaggccggcgattacagcgtgtacgagttcctgtccaagaaagagaaccacttcatctggcggaatcaccctgagtacccctacctgtacgccaccttctgcgagatcgacaagaaaaagaaggacgccaagcagcaggccaccttcacactggccgatcctatcaatcaccctctgtgggtccgattcgaggaaagaagcggcagcaacctgaacaagtacagaatcctgaccgagcagctgcacaccgagaagctgaagaaaaagctgacagtgcagctggaccggctgatctaccctacagaatctggcggctgggaagagaagggcaaagtggacattgtgctgctgcccagccggcagttctacaaccagatcttcctggacatcgaggaaaagggcaagcacgccttcacctacaaggatgagagcatcaagttccctctgaagggcacactcggcggagccagagtgcagttcgacagagatcacctgagaagataccctcacaaggtggaaagcggcaacgtgggcagaatctacttcaacatgaccgtgaacatcgagcctacagagtccccagtgtccaagtctctgaagatccaccgggacgacttccccaaggtggtcaacttcaagcccaaagaactgaccgagtggatcaaggacagcaagggcaagaaactgaagtccggcatcgagtccctggaaatcggcctgagagtgatgagcatcgacctgggacagagacaggccgctgccgcctctattttcgaggtggtggatcagaagcccgacatcgaaggcaagctgtttttcccaatcaagggcaccgagctgtatgccgtgcacagagccagcttcaacatcaagctgcccggcgagacactggtcaagagcagagaagtgctgcggaaggccagagaggacaatctgaaactgatgaaccagaagctcaacttcctgcggaacgtgctgcacttccagcagttcgaggacatcaccgagagagagaagcgggtcaccaagtggatcagcagacaagagaacagcgacgtgcccctggtgtaccaggatgagctgatccagatccgcgagctgatgtacaagccttacaaggactgggtcgccttcctgaagcagctccacaagagactggaagtcgagatcggcaaagaagtgaagcactggcggaagtccctgagcgacggaagaaagggcctgtacggcatctccctgaagaacatcgacgagatcgatcggacccggaagttcctgctgagatggtccctgaggcctaccgaacctggcgaagtgcgtagactggaacccggccagagattcgccatcgaccagctgaatcacctgaacgccctgaaagaagatcggctgaagaagatggccaacaccatcatcatgcacgccctgggctactgctacgacgtgcggaagaagaaatggcaggctaagaaccccgcctgccagatcatcctgttcgaggatctgagcaactacaacccctacgaggaaaggtcccgcttcgagaacagcaagctcatgaagtggtccagacgcgagatccccagacaggttgcactgcagggcgagatctatggcctgcaagtgggagaagtgggcgctcagttcagcagcagattccacgccaagacaggcagccctggcatcagatgtagcgtcgtgaccaaagagaagctgcaggacaatcggttcttcaagaatctgcagagagagggcagactgaccctggacaaaatcgccgtgctgaaagagggcgatctgtacccagacaaaggcggcgagaagttcatcagcctgagcaaggatcggaagtgcgtgaccacacacgccgacatcaacgccgctcagaacctgcagaagcggttctggacaagaacccacggcttctacaaggtgtactgcaaggcctaccaggtggacggccagaccgtgtacatccctgagagcaaggaccagaagcagaagatcatcgaagagttcggcgagggctacttcattctgaaggacggggtgtacgaatgggtcaacgccggcaagggaggctctggaggaagctccgaagtcgagttttcccatgagtactggatgagacacgcattgactctcgcaaagagggctcgagatgaacgcgaggtgcccgtgggggcagtactcgtgctcaacaatcgcgtaatcggcgaaggttggaatagggcaatcggactccacgaccccactgcacatgcggaaatcatggcccttcgacagggagggcttgtgatgcagaattatcgactttatgatgcgacgctgtacgtcacgtttgaaccttgcgtaatgtgcgcgggagctatgattcactcccgcattggacgagttgtattcggtgttcgcaacgccaagacgggtgccgcaggttcactgatggacgtgctgcatcatccaggcatgaaccaccgggtagaaatcacagaaggcatattggcggacgaatgtgcggcgctgttgtgtcgtttttttcgcatgcccaggcgggtctttaacgcccagaaaaaagcacaatcctctactgacggctcttctggatctgaaacacctggcacaagcgagagcgccacccctgagagctctggcctgaaaatcaagaagggcagctccaagcagagcagcagcgagctggtggatagcgacatcctgaaagacagcttcgacctggcctccgagctgaaaggcgaaaagctgatgctgtacagggaccccagcggcaatgtgttccccagcgacaaatggatggccgctggcgtgttcttcggaaagctggaacgcatcctgatcagcaagctgaccaaccagtactccatcagcaccatcgaggacgacagcagcaagcagtctatgaaaaggccggcggccacgaaaaaggccggccaggcaaaaaagaaaaagggatcctacccatacgatgttccagattacgcttatccctacgacgtgcctgattatgcatacccatatgatgtccccgactatgcctaa

SEQ ID NO: 11 - protein, 1361 aa, synthetic construct
  REGION 1..1361: note = BhCas12b GGSGGS-ABE8-Xten20at K1019 polypeptide sequence
MAPKKKRKVGIHGVPAAATRSFILKIEPNEEVKKGLWKTHEVLNHGIAYYMNILKLIRQEAIYEHHEQDPKNPKKVSKAEIQAELWDFVLKMQKCNSFTHEVDKDEVFNILRELYEELVPSSVEKKGEANQLSNKFLYPLVDPNSQSGKGTASSGRKPRWYNLKIAGDPSWEEEKKKWEEDKKKDPLAKILGKLAEYGLIPLFIPYTDSNEPIVKEIKWMEKSRNQSVRRLDKDMFIQALERFLSWESWNLKVKEEYEKVEKEYKTLEERIKEDIQALKALEQYEKERQEQLLRDTLNTNEYRLSKRGLRGWREIIQKWLKMDENEPSEKYLEVFKDYQRKHPREAGDYSVYEFLSKKENHFIWRNHPEYPYLYATFCEIDKKKKDAKQQATFTLADPINHPLWVRFEERSGSNLNKYRILTEQLHTEKLKKKLTVQLDRLIYPTESGGWEEKGKVDIVLLPSRQFYNQIFLDIEEKGKHAFTYKDESIKFPLKGTLGGARVQFDRDHLRRYPHKVESGNVGRIYFNMTVNIEPTESPVSKSLKIHRDDFPKVVNFKPKELTEWIKDSKGKKLKSGIESLEIGLRVMSIDLGQRQAAAASIFEVVDQKPDIEGKLFFPIKGTELYAVHRASFNIKLPGETLVKSREVLRKAREDNLKLMNQKLNFLRNVLHFQQFEDITEREKRVTKWISRQENSDVPLVYQDELIQIRELMYKPYKDWVAFLKQLHKRLEVEIGKEVKHWRKSLSDGRKGLYGISLKNIDEIDRTRKFLLRWSLRPTEPGEVRRLEPGQRFAIDQLNHLNALKEDRLKKMANTIIMHALGYCYDVRKKKWQAKNPACQIILFEDLSNYNPYEERSRFENSKLMKWSRREIPRQVALQGEIYGLQVGEVGAQFSSRFHAKTGSPGIRCSVVTKEKLQDNRFFKNLQREGRLTLDKIAVLKEGDLYPDKGGEKFISLSKDRKCVTTHADINAAQNLQKRFWTRTHGFYKVYCKAYQVDGQTVYIPESKDQKQKIIEEFGEGYFILKDGVYEWVNAGKGGSGGSSEVEFSHEYWMRHALTLAKRARDEREVPVGAVLVLNNRVIGEGWNRAIGLHDPTAHAEIMALRQGGLVMQNYRLYDATLYVTFEPCVMCAGAMIHSRIGRVVFGVRNAKTGAAGSLMDVLHHPGMNHRVEITEGILADECAALLCRFFRMPRRVFNAQKKAQSSTDGSSGSETPGTSESATPESSGLKIKKGSSKQSSSELVDSDILKDSFDLASELKGEKLMLYRDPSGNVFPSDKWMAAGVFFGKLERILISKLTNQYSISTIEDDSSKQSMKRPAATKKAGQAKKKKGSYPYDVPDYAYPYDVPDYAYPYDVPDYA

SEQ ID NO: 12 - protein, 208 aa, Petromyzon marinus
  REGION 1..208: note = MISC_FEATURE - tr|A5H718|A5H718_PETMA Cytosine deaminase OS=Petromyzon marinusOX=7757 PE=2 SV=1 amino acid sequence; PmCDA1 polypeptide sequence
MTDAEYVRIHEKLDIYTFKKQFFNNKKSVSHRCYVLFELKRRGERRACFWGYAVNKPQSGTERGIHAEIFSIRKVEEYLRDNPGQFTINWYSSWSPCADCAEKILEWYNQELRGNGHTLKIWACKLYYEKNARNQIGLWNLRDNGVGLNVMVSEHYQCCRKIFIQSSHNQLNENRWLEKTLKRAEKRRSELSIMIQVKILHTTKSPAV

SEQ ID NO: 13 - DNA, 766 bp, Petromyzon marinus
  misc_feature 1..766: note = EF094822.1 Petromyzon marinus isolate PmCDA.21 cytosine deaminase mRNA, complete cds; PmCDA1 polynucleotide sequence
  source 1..766: mol_type = genomic DNA
tgacacgacacagccgtgtatatgaggaagggtagctggatggggggggggggaatacgttcagagaggacattagcgagcgtcttgttggtggccttgagtctagacacctgcagacatgaccgacgctgagtacgtgagaatccatgagaagttggacatctacacgtttaagaaacagtttttcaacaacaaaaaatccgtgtcgcatagatgctacgttctctttgaattaaaacgacggggtgaacgtagagcgtgtttttggggctatgctgtgaataaaccacagagcgggacagaacgtggaattcacgccgaaatctttagcattagaaaagtcgaagaatacctgcgcgacaaccccggacaattcacgataaattggtactcatcctggagtccttgtgcagattgcgctgaaaagatcttagaatggtataaccaggagctgcgggggaacggccacactttgaaaatctgggcttgcaaactctattacgagaaaaatgcgaggaatcaaattgggctgtggaacctcagagataacggggttgggttgaatgtaatggtaagtgaacactaccaatgttgcaggaaaatattcatccaatcgtcgcacaatcaattgaatgagaatagatggcttgagaagactttgaagcgagctgaaaaacgacggagcgagttgtccattatgattcaggtaaaaatactccacaccactaagagtcctgctgtttaagaggctatgcggatggttttc

SEQ ID NO: 14 - protein, 145 aa, Homo sapiens
  REGION 1..145: note = MISC_FEATURE - tr|Q6QJ80|Q6QJ80_HUMAN Activation-induced cytidine deaminase OS=Homo sapiens; OX = 9606 GN=AICDA PE=2 SV=1; AID polypeptide sequence
MDSLLMNRRKFLYQFKNVRWAKGRRETYLCYVVKRRDSATSFSLDFGYLRNKNGCHVELLFLRYISDWDLDPGRCYRVTWFTSWSPCYDCARHVADFLRGNPNLSLRIFTARLYFCEDRKAEPEGLRRLHRAGVQIAIMTFKAPV

SEQ ID NO: 15 - DNA, 10681 bp, Homo sapiens
  misc_feature 1..10681: note = NG_011588.1:5001-15681 Homo sapiens activation induced cytidine deaminase (AICDA), RefSeqGene (LRG_17) on chromosome 12; nucleic acid sequence of the CDS of human AID; polynucleotide sequence
  source 1..10681: mol_type = genomic DNA
agagaaccatcattaattgaagtgagatttttctggcctgagacttgcagggaggcaagaagacactctggacaccactatggacaggtaaagaggcagtcttctcgtgggtgattgcactggccttcctctcagagcaaatctgagtaatgagactggtagctatccctttctctcatgtaactgtctgactgataagatcagcttgatcaatatgcatatatattttttgatctgtctccttttcttctattcagatcttatacgctgtcagcccaattctttctgtttcagacttctcttgatttccctctttttcatgtggcaaaagaagtagtgcgtacaatgtactgattcgtcctgagatttgtaccatggttgaaactaatttatggtaataatattaacatagcaaatctttagagactcaaatcatgaaaaggtaatagcagtactgtactaaaaacggtagtgctaattttcgtaataattttgtaaatattcaacagtaaaacaacttgaagacacactttcctagggaggcgttactgaaataatttagctatagtaagaaaatttgtaattttagaaatgccaagcattctaaattaattgcttgaaagtcactatgattgtgtccattataaggagacaaattcattcaagcaagttatttaatgttaaaggcccaattgttaggcagttaatggcacttttactattaactaatctttccatttgttcagacgtagcttaacttacctcttaggtgtgaatttggttaaggtcctcataatgtctttatgtgcagtttttgataggttattgtcatagaacttattctattcctacatttatgattactatggatgtatgagaataacacctaatccttatactttacctcaatttaactcctttataaagaacttacattacagaataaagattttttaaaaatatatttttttgtagagacagggtcttagcccagccgaggctggtctctaagtcctggcccaagcgatcctcctgcctgggcctcctaaagtgctggaattatagacatgagccatcacatccaatatacagaataaagatttttaatggaggatttaatgttcttcagaaaattttcttgaggtcagacaatgtcaaatgtctcctcagtttacactgagattttgaaaacaagtctgagctataggtccttgtgaagggtccattggaaatacttgttcaaagtaaaatggaaagcaaaggtaaaatcagcagttgaaattcagagaaagacagaaaaggagaaaagatgaaattcaacaggacagaagggaaatatattatcattaaggaggacagtatctgtagagctcattagtgatggcaaaatgacttggtcaggattatttttaacccgcttgtttctggtttgcacggctggggatgcagctagggttctgcctcagggagcacagctgtccagagcagctgtcagcctgcaagcctgaaacactccctcggtaaagtccttcctactcaggacagaaatgacgagaacagggagctggaaacaggcccctaaccagagaagggaagtaatggatcaacaaagttaactagcaggtcaggatcacgcaattcatttcactctgactggtaacatgtgacagaaacagtgtaggcttattgtattttcatgtagagtaggacccaaaaatccacccaaagtcctttatctatgccacatccttcttatctatacttccaggacactttttcttccttatgataaggctctctctctctccacacacacacacacacacacacacacacacacacacacacacacaaacacacaccccgccaaccaaggtgcatgtaaaaagatgtagattcctctgcctttctcatctacacagcccaggagggtaagttaatataagagggatttattggtaagagatgatgcttaatctgtttaacactgggcctcaaagagagaatttcttttcttctgtacttattaagcacctattatgtgttgagcttatatatacaaagggttattatatgctaatatagtaatagtaatggtggttggtactatggtaattaccataaaaattattatccttttaaaataaagctaattattattggatcttttttagtattcattttatgttttttatgtttttgattttttaaaagacaatctcaccctgttacccaggctggagtgcagtggtgcaatcatagctttctgcagtcttgaactcctgggctcaagcaatcctcctgccttggcctcccaaagtgttgggatacagtcatgagccactgcatctggcctaggatccatttagattaaaatatgcattttaaattttaaaataatatggctaatttttaccttatgtaatgtgtatactggcaataaatctagtttgctgcctaaagtttaaagtgctttccagtaagcttcatgtacgtgaggggagacatttaaagtgaaacagacagccaggtgtggtggctcacgcctgtaatcccagcactctgggaggctgaggtgggtggatcgcttgagccctggagttcaagaccagcctgagcaacatggcaaaacgctgtttctataacaaaaattagccgggcatggtggcatgtgcctgtggtcccagctactagggggctgaggcaggagaatcgttggagcccaggaggtcaaggctgcactgagcagtgcttgcgccactgcactccagcctgggtgacaggaccagaccttgcctcaaaaaaataagaagaaaaattaaaaataaatggaaacaactacaaagagctgttgtcctagatgagctacttagttaggctgatattttggtatttaacttttaaagtcagggtctgtcacctgcactacattattaaaatatcaattctcaatgtatatccacacaaagactggtacgtgaatgttcatagtacctttattcacaaaaccccaaagtagagactatccaaatatccatcaacaagtgaacaaataaacaaaatgtgctatatccatgcaatggaataccaccctgcagtacaaagaagctacttggggatgaatcccaaagtcatgacgctaaatgaaagagtcagacatgaaggaggagataatgtatgccatacgaaattctagaaaatgaaagtaacttatagttacagaaagcaaatcagggcaggcatagaggctcacacctgtaatcccagcactttgagaggccacgtgggaagattgctagaactcaggagttcaagaccagcctgggcaacacagtgaaactccattctccacaaaaatgggaaaaaaagaaagcaaatcagtggttgtcctgtggggaggggaaggactgcaaagagggaagaagctctggtggggtgagggtggtgattcaggttctgtatcctgactgtggtagcagtttggggtgtttacatccaaaaatattcgtagaattatgcatcttaaatgggtggagtttactgtatgtaaattatacctcaatgtaagaaaaaataatgtgtaagaaaactttcaattctcttgccagcaaacgttattcaaattcctgagccctttacttcgcaaattctctgcacttctgccccgtaccattaggtgacagcactagctccacaaattggataaatgcatttctggaaaagactagggacaaaatccaggcatcacttgtgctttcatatcaaccatgctgtacagcttgtgttgctgtctgcagctgcaatggggactcttgatttctttaaggaaacttgggttaccagagtatttccacaaatgctattcaaattagtgcttatgatatgcaagacactgtgctaggagccagaaaacaaagaggaggagaaatcagtcattatgtgggaacaacatagcaagatatttagatcattttgactagttaaaaaagcagcagagtacaaaatcacacatgcaatcagtataatccaaatcatgtaaatatgtgcctgtagaaagactagaggaataaacacaagaatcttaacagtcattgtcattagacactaagtctaattattattattagacactatgatatttgagatttaaaaaatctttaatattttaaaatttagagctcttctatttttccatagtattcaagtttgacaatgatcaagtattactctttctttttttttttttttttttttttttgagatggagttttggtcttgttgcccatgctggagtggaatggcatgaccatagctcactgcaacctccacctcctgggttcaagcaaagctgtcgcctcagcctcccgggtagatgggattacaggcgcccaccaccacactcggctaatgtttgtatttttagtagagatggggtttcaccatgttggccaggctggtctcaaactcctgacctcagaggatccacctgcctcagcctcccaaagtgctgggattacagatgtaggccactgcgcccggccaagtattgctcttatacattaaaaaacaggtgtgagccactgcgcccagccaggtattgctcttatacattaaaaaataggccggtgcagtggctcacgcctgtaatcccagcactttgggaagccaaggcgggcagaacacccgaggtcaggagtccaaggccagcctggccaagatggtgaaaccccgtctctattaaaaatacaaacattacctgggcatgatggtgggcgcctgtaatcccagctactcaggaggctgaggcaggaggatccgcggagcctggcagatctgcctgagcctgggaggttgaggctacagtaagccaagatcatgccagtatacttcagcctgggcgacaaagtgagaccgtaacaaaaaaaaaaaaatttaaaaaaagaaatttagatcaagatccaactgtaaaaagtggcctaaacaccacattaaagagtttggagtttattctgcaggcagaagagaaccatcagggggtcttcagcatgggaatggcatggtgcacctggtttttgtgagatcatggtggtgacagtgtggggaatgttattttggagggactggaggcagacagaccggttaaaaggccagcacaacagataaggaggaagaagatgagggcttggaccgaagcagagaagagcaaacagggaaggtacaaattcaagaaatattggggggtttgaatcaacacatttagatgattaattaaatatgaggactgaggaataagaaatgagtcaaggatggttccaggctgctaggctgcttacctgaggtggcaaagtcgggaggagtggcagtttaggacagggggcagttgaggaatattgttttgatcattttgagtttgaggtacaagttggacacttaggtaaagactggaggggaaatctgaatatacaattatgggactgaggaacaagtttattttattttttgtttcgttttcttgttgaagaacaaatttaattgtaatcccaagtcatcagcatctagaagacagtggcaggaggtgactgtcttgtgggtaagggtttggggtccttgatgagtatctctcaattggccttaaatataagcaggaaaaggagtttatgatggattccaggctcagcagggctcaggagggctcaggcagccagcagaggaagtcagagcatcttctttggtttagcccaagtaatgacttccttaaaaagctgaaggaaaatccagagtgaccagattataaactgtactcttgcattttctctccctcctctcacccacagcctcttgatgaaccggaggaagtttctttaccaattcaaaaatgtccgctgggctaagggtcggcgtgagacctacctgtgctacgtagtgaagaggcgtgacagtgctacatccttttcactggactttggttatcttcgcaataaggtatcaattaaagtcggctttgcaagcagtttaatggtcaactgtgagtgcttttagagccacctgctgatggtattacttccatccttttttggcatttgtgtctctatcacattcctcaaatccttttttttatttctttttccatgtccatgcacccatattagacatggcccaaaatatgtgatttaattcctccccagtaatgctgggcaccctaataccactccttccttcagtgccaagaacaactgctcccaaactgtttaccagctttcctcagcatctgaattgcctttgagattaattaagctaaaagcatttttatatgggagaatattatcagcttgtccaagcaaaaattttaaatgtgaaaaacaaattgtgtcttaagcatttttgaaaattaaggaagaagaatttgggaaaaaattaacggtggctcaattctgtcttccaaatgatttcttttccctcctactcacatgggtcgtaggccagtgaatacattcaacatggtgatccccagaaaactcagagaagcctcggctgatgattaattaaattgatctttcggctacccgagagaattacatttccaagagacttcttcaccaaaatccagatgggtttacataaacttctgcccacgggtatctcctctctcctaacacgctgtgacgtctgggcttggtggaatctcagggaagcatccgtggggtggaaggtcatcgtctggctcgttgtttgatggttatattaccatgcaattttctttgcctacatttgtattgaatacatcccaatctccttcctattcggtgacatgacacattctatttcagaaggctttgattttatcaagcactttcatttacttctcatggcagtgcctattacttctcttacaatacccatctgtctgctttaccaaaatctatttccccttttcagatcctcccaaatggtcctcataaactgtcctgcctccacctagtggtccaggtatatttccacaatgttacatcaacaggcacttctagccattttccttctcaaaaggtgcaaaaagcaacttcataaacacaaattaaatcttcggtgaggtagtgtgatgctgcttcctcccaactcagcgcacttcgtcttcctcattccacaaaaacccatagccttccttcactctgcaggactagtgctgccaagggttcagctctacctactggtgtgctcttttgagcaagttgcttagcctctctgtaacacaaggacaatagctgcaagcatccccaaagatcattgcaggagacaatgactaaggctaccagagccgcaataaaagtcagtgaattttagcgtggtcctctctgtctctccagaacggctgccacgtggaattgctcttcctccgctacatctcggactgggacctagaccctggccgctgctaccgcgtcacctggttcacctcctggagcccctgctacgactgtgcccgacatgtggccgactttctgcgagggaaccccaacctcagtctgaggatcttcaccgcgcgcctctacttctgtgaggaccgcaaggctgagcccgaggggctgcggcggctgcaccgcgccggggtgcaaatagccatcatgaccttcaaaggtgcgaaagggccttccgcgcaggcgcagtgcagcagcccgcattcgggattgcgatgcggaatgaatgagttagtggggaagctcgaggggaagaagtgggcggggattctggttcacctctggagccgaaattaaagattagaagcagagaaaagagtgaatggctcagagacaaggccccgaggaaatgagaaaatggggccagggttgcttctttcccctcgatttggaacctgaactgtcttctacccccatatccccgcctttttttcctttttttttttttgaagattatttttactgctggaatacttttgtagaaaaccacgaaagaactttcaaagcctgggaagggctgcatgaaaattcagttcgtctctccagacagcttcggcgcatccttttggtaaggggcttcctcgctttttaaattttctttctttctctacagtcttttttggagtttcgtatatttcttatattttcttattgttcaatcactctcagttttcatctgatgaaaactttatttctcctccacatcagctttttcttctgctgtttcaccattcagagccctctgctaaggttccttttccctcccttttctttcttttgttgtttcacatctttaaatttctgtctctccccagggttgcgtttccttcctggtcagaattcttttctcctttttttttttttttttttttttttttaaacaaacaaacaaaaaacccaaaaaaactctttcccaatttactttcttccaacatgttacaaagccatccactcagtttagaagactctccggccccaccgacccccaacctcgttttgaagccattcactcaatttgcttctctctttctctacagcccctgtatgaggttgatgacttacgagacgcatttcgtactttgggactttgatagcaacttccaggaatgtcacacacgatgaaatatctctgctgaagacagtggataaaaaacagtccttcaagtcttctctgtttttattcttcaactctcactttcttagagtttacagaaaaaatatttatatacgactctttaaaaagatctatgtcttgaaaatagagaaggaacacaggtctggccagggacgtgctgcaattggtgcagttttgaatgcaacattgtcccctactgggaataacagaactgcaggacctgggagcatcctaaagtgtcaacgtttttctatgacttttaggtaggatgagagcagaaggtagatcctaaaaagcatggtgagaggatcaaatgtttttatatcaacatcctttattatttgattcatttgagttaacagtggtgttagtgatagatttttctattcttttcccttgacgtttactttcaagtaacacaaactcttccatcaggccatgatctataggacctcctaatgagagtatctgggtgattgtgaccccaaaccatctctccaaagcattaatatccaatcatgcgctgtatgttttaatcagcagaagcatgtttttatgtttgtacaaaagaagattgttatgggtggggatggaggtatagaccatgcatggtcaccttcaagctactttaataaaggatcttaaaatgggcaggaggactgtgaacaagacaccctaataatgggttgatgtctgaagtagcaaatcttctggaaacgcaaactcttttaaggaagtccctaatttagaaacacccacaaacttcacatatcataattagcaaacaattggaaggaagttgcttgaatgttggggagaggaaaatctattggctctcgtgggtctcttcatctcagaaatgccaatcaggtcaaggtttgctacattttgtatgtgtgtgatgcttctcccaaaggtatattaactatataagagagttgtgacaaaacagaatgataaagctgcgaaccgtggcacacgctcatagttctagctgcttgggaggttgaggagggaggatggcttgaacacaggtgttcaaggccagcctgggcaacataacaagatcctgtctctcaaaaaaaaaaaaaaaaaaaagaaagagagagggccgggcgtggtggctcacgcctgtaatcccagcactttgggaggccgagccgggcggatcacctgtggtcaggagtttgagaccagcctggccaacatggcaaaaccccgtctgtactcaaaatgcaaaaattagccaggcgtggtagcaggcacctgtaatcccagctacttgggaggctgaggcaggagaatcgcttgaacccaggaggtggaggttgcagtaagctgagatcgtgccgttgcactccagcctgggcgacaagagcaagactctgtctcagaaaaaaaaaaaaaaaagagagagagagagaaagagaacaatatttgggagagaaggatggggaagcattgcaaggaaattgtgctttatccaacaaaatgtaaggagccaataagggatccctatttgtctcttttggtgtctatttgtccctaacaactgtctttgacagtgagaaaaatattcagaataaccatatccctgtgccgttattacctagcaacccttgcaatgaagatgagcagatccacaggaaaacttgaatgcacaactgtcttattttaatcttattgtacataagtttgtaaaagagttaaaaattgttacttcatgtattcatttatattttatattattttgcgtctaatgattttttattaacatgatttccttttctgatatattgaaatggagtctcaaagcttcataaatttataactttagaaatgattctaataacaacgtatgtaattgtaacattgcagtaatggtgctacgaagccatttctcttgatttttagtaaacttttatgacagcaaatttgcttctggctcactttcaatcagttaaataaatgataaataattttggaagctgtgaagataaaataccaaataaaataatataaaagtgatttatatgaagttaaaataaaaaatcagtatgatggaataaacttg

SEQ ID NO: 16 - protein, 198 aa, Homo sapiens [sequence omitted]

SEQ ID NO: 17 - protein, 198 aa, Canis lupus
  REGION 1..198: note = MISC_FEATURE - Canine AID (clAID) polypeptide sequence
  REGION 1..30: note = MISC_FEATURE - Nuclear localization sequence
  REGION 183..198: note = MISC_FEATURE - Nuclear export signal
MDSLLMKQRKFLYHFKNVRWAKGRHETYLCYVVKRRDSATSFSLDFGHLRNKSGCHVELLFLRYISDWDLDPGRCYRVTWFTSWSPCYDCARHVADFLRGYPNLSLRIFAARLYFCEDRKAEPEGLRRLHRAGVQIAIMTFKDYFYCWNTFVENREKTFKAWEGLHENSVRLSRQLRRILLPLYEVDDLRDAFRTLGL

SEQ ID NO: 18 - protein, 199 aa, Bos taurus
  REGION 1..199: note = MISC_FEATURE - Bovine AID (btAID) polypeptide sequence
  REGION 1..30: note = MISC_FEATURE - Nuclear localization sequence
  REGION 183..199: note = MISC_FEATURE - Nuclear export signal
MDSLLKKQRQFLYQFKNVRWAKGRHETYLCYVVKRRDSPTSFSLDFGHLRNKAGCHVELLFLRYISDWDLDPGRCYRVTWFTSWSPCYDCARHVADFLRGYPNLSLRIFTARLYFCDKERKAEPEGLRRLHRAGVQIAIMTFKDYFYCWNTFVENHERTFKAWEGLHENSVRLSRQLRRILLPLYEVDDLRDAFRTLGL

SEQ ID NO: 19 - protein, 239 aa, Rattus sp.
  REGION 1..239: note = MISC_FEATURE - Rat AID polypeptide sequence
  REGION 1..26: note = MISC_FEATURE - Nuclear localization sequence
  REGION 194..239: note = MISC_FEATURE - Nuclear export signal
MAVGSKPKAALVGPHWERERIWCFLCSTGLGTQQTGQTSRWLRPAATQDPVSPPRSLLMKQRKFLYHFKNVRWAKGRHETYLCYVVKRRDSATSFSLDFGYLRNKSGCHVELLFLRYISDWDLDPGRCYRVTWFTSWSPCYDCARHVADFLRGNPNLSLRIFTARLTGWGALPAGLMSPARPSDYFYCWNTFVENHERTFKAWEGLHENSVRLSRRLRRILLPLYEVDDLRDAFRTLGL

SEQ ID NO: 20 - protein, 198 aa, Mus musculus [sequence omitted]

SEQ ID NO: 21 - protein, 229 aa, Rattus norvegicus [sequence omitted]

SEQ ID NO: 22 - protein, 229 aa, Mesocricetus auratus
  REGION 1..229: note = MISC_FEATURE - maAPOBEC-1 polypeptide sequence
MSSETGPVVVDPTLRRRIEPHEFDAFFDQGELRKETCLLYEIRWGGRHNIWRHTGQNTSRHVEINFIEKFTSERYFYPSTRCSIVWFLSWSPCGECSKAITEFLSGHPNVTLFIYAARLYHHTDQRNRQGLRDLISRGVTIRIMTEQEYCYCWRNFVNYPPSNEVYWPRYPNLWMRLYALELYCIHLGLPPCLKIKRRHQYPLTFFRLNLQSCHYQRIPPHILWATGFI

SEQ ID NO: 23 - protein, 236 aa, Pongo pygmaeus
  REGION 1..236: note = MISC_FEATURE - ppAPOBEC-1 polypeptide sequence
MTSEKGPSTGDPTLRRRIESWEFDVFYDPRELRKETCLLYEIKWGMSRKIWRSSGKNTTNHVEVNFIKKFTSERRFHSSISCSITWFLSWSPCWECSQAIREFLSQHPGVTLVIYVARLFWHMDQRNRQGLRDLVNSGVTIQIMRASEYYHCWRNFVNYPPGDEAHWPQYPPLWMMLYALELHCIILSLPPCLKISRRWQNHLAFFRLHLQNCHYQTIPPHILLATGLIHPSVTWR

SEQ ID NO: 24 - protein, 236 aa, Oryctolagus cuniculus
  REGION 1..236: note = MISC_FEATURE - ocAPOBEC1 polypeptide sequence
MASEKGPSNKDYTLRRRIEPWEFEVFFDPQELRKEACLLYEIKWGASSKTWRSSGKNTTNHVEVNFLEKLTSEGRLGPSTCCSITWFLSWSPCWECSMAIREFLSQHPGVTLIIFVARLFQHMDRRNRQGLKDLVTSGVTVRVMSVSEYCYCWENFVNYPPGKAAQWPRYPPRWMLMYALELYCIILGLPPCLKISRRHQKQLTFFSLTPQYCHYKMIPPYILLATGLLQPSVPWR

SEQ ID NO: 25 - protein, 235 aa, Monodelphis domestica
  REGION 1..235: note = MISC_FEATURE - mdAPOBEC-1 polypeptide sequence
MNSKTGPSVGDATLRRRIKPWEFVAFFNPQELRKETCLLYEIKWGNQNIWRHSNQNTSQHAEINFMEKFTAERHFNSSVRCSITWFLSWSPCWECSKAIRKFLDHYPNVTLAIFISRLYWHMDQQHRQGLKELVHSGVTIQIMSYSEYHYCWRNFVDYPQGEEDYWPKYPYLWIMLYVLELHCIILGLPPCLKISGSHSNQLALFSLDLQDCHYQKIPYNVLVATGLVQPFVTWR

SEQ ID NO: 26 - protein, 224 aa, Pongo pygmaeus
  REGION 1..224: note = MISC_FEATURE - ppAPOBEC-2 polypeptide sequence
MAQKEEAAAATEAASQNGEDLENLDDPEKLKELIELPPFEIVTGERLPANFFKFQFRNVEYSSGRNKTFLCYVVEAQGKGGQVQASRGYLEDEHAAAHAEEAFFNTILPAFDPALRYNVTWYVSSSPCAACADRIIKTLSKTKNLRLLILVGRLFMWEELEIQDALKKLKEAGCKLRIMKPQDFEYVWQNFVEQEEGESKAFQPWEDIQENFLYYEEKLADILK

SEQ ID NO: 27 - protein, 224 aa, Bos taurus
  REGION 1..224: note = MISC_FEATURE - btAPOBEC-2 polypeptide sequence
MAQKEEAAAAAEPASQNGEEVENLEDPEKLKELIELPPFEIVTGERLPAHYFKFQFRNVEYSSGRNKTFLCYVVEAQSKGGQVQASRGYLEDEHATNHAEEAFFNSIMPTFDPALRYMVTWYVSSSPCAACADRIVKTLNKTKNLRLLILVGRLFMWEEPEIQAALRKLKEAGCRLRIMKPQDFEYIWQNFVEQEEGESKAFEPWEDIQENFLYYEEKLADILK

SEQ ID NO: 28 - protein, 440 aa, Mus musculus
  REGION 1..440: note = MISC_FEATURE - mAPOBEC-3-(1) polypeptide sequence
MQPQRLGPRAGMGPFCLGCSHRKCYSPIRNLISQETFKFHFKNLGYAKGRKDTFLCYEVTRKDCDSPVSLHHGVFKNKDNIHAEICFLYWFHDKVLKVLSPREEFKITWYMSWSPCFECAEQIVRFLATHHNLSLDIFSSRLYNVQDPETQQNLCRLVQEGAQVAAMDLYEFKKCWKKFVDNGGRRFRPWKRLLTNFRYQDSKLQEILRPCYISVPSSSSSTLSNICLTKGLPETRFWVEGRRMDPLSEEEFYSQFYNQRVKHLCYYHRMKPYLCYQLEQFNGQAPLKGCLLSEKGKQHAEILFLDKIRSMELSQVTITCYLTWSPCPNCAWQLAAFKRDRPDLILHIYTSRLYFHWKRPFQKGLCSLWQSGILVDVMDLPQFTDCWTNFVNPKRPFWPWKGLEIISRRTQRRLRRIKESWGLQDLVNDFGNLQLGPPMS

SEQ ID NO: 29 - protein, 429 aa, Mus musculus
  REGION 1..429: note = MISC_FEATURE - APOBEC-3-(2) (Mouse APOBEC-3) polypeptide sequence
  REGION 71..108: note = MISC_FEATURE - Nucleic acid editing domain
  REGION 288..319: note = MISC_FEATURE - Nucleic acid editing domain
MGPFCLGCSHRKCYSPIRNLISQETFKFHFKNLGYAKGRKDTFLCYEVTRKDCDSPVSLHHGVFKNKDNIHAEICFLYWFHDKVLKVLSPREEFKITWYMSWSPCFECAEQIVRFLATHHNLSLDIFSSRLYNVQDPETQQNLCRLVQEGAQVAAMDLYEFKKCWKKFVDNGGRRFRPWKRLLTNFRYQDSKLQEILRPCYIPVPSSSSSTLSNICLTKGLPETRFCVEGRRMDPLSEEEFYSQFYNQRVKHLCYYHRMKPYLCYQLEQFNGQAPLKGCLLSEKGKQHAEILFLDKIRSMELSQVTITCYLTWSPCPNCAWQLAAFKRDRPDLILHIYTSRLYFHWKRPFQKGLCSLWQSGILVDVMDLPQFTDCWTNFVNPKRPFWPWKGLEIISRRTQRRLRRIKESWGLQDLVNDFGNLQLGPPMS

SEQ ID NO: 30 - protein, 430 aa, Rattus sp.
  REGION 1..430: note = MISC_FEATURE - APOBEC-3 polypeptide sequence
  REGION 72..109: note = MISC_FEATURE - Nucleic acid editing domain
  REGION 289..320: note = MISC_FEATURE - Nucleic acid editing domain
MGPFCLGCSHRKCYSPIRNLISQETFKFHFKNRLRYAIDRKDTFLCYEVTRKDCDSPVSLHHGVFKNKDNIHAEICFLYWFHDKVLKVLSPREEFKITWYMSWSPCFECAEQVLRFLATHHNLSLDIFSSRLYNIRDPENQQNLCRLVQEGAQVAAMDLYEFKKCWKKFVDNGGRRFRPWKKLLTNFRYQDSKLQEILRPCYIPVPSSSSSTLSNICLTKGLPETRFCVERRRVHLLSEEEFYSQFYNQRVKHLCYYHGVKPYLCYQLEQFNGQAPLKGCLLSEKGKQHAEILFLDKIRSMELSQVIITCYLTWSPCPNCAWQLAAFKRDRPDLILHIYTSRLYFHWKRPFQKGLCSLWQSGILVDVMDLPQFTDCWTNFVNPKRPFWPWKGLEIISRRTQRRLHRIKESWGLQDLVNDFGNLQLGPPMS

SEQ ID NO: 31 - protein, 199 aa, Homo sapiens
  REGION 1..199: note = MISC_FEATURE - hAPOBEC-3A polypeptide sequence
  REGION 70..106: note = MISC_FEATURE - Nucleic acid editing domain
MEASPASGPRHLMDPHIFTSNFNNGIGRHKTYLCYEVERLDNGTSVKMDQHRGFLHNQAKNLLCGFYGRHAELRFLDLVPSLQLDPAQIYRVTWFISWSPCFSWGCAGEVRAFLQENTHVRLRIFAARIYDYDPLYKEALQMLRDAGAQVSIMTYDEFKHCWDTFVDHQGCPFQPWDGLDEHSQALSGRLRAILQNQGN

SEQ ID NO: 32 - protein, 373 aa, Homo sapiens
  REGION 1..373: note = MISC_FEATURE - hAPOBEC-3F polypeptide sequence
  REGION 65..99: note = MISC_FEATURE - Nucleic acid editing domain
  REGION 248..283: note = MISC_FEATURE - Nucleic acid editing domain
MKPHFRNTVERMYRDTFSYNFYNRPILSRRNTVWLCYEVKTKGPSRPRLDAKIFRGQVYSQPEHHAEMCFLSWFCGNQLPAYKCFQITWFVSWTPCPDCVAKLAEFLAEHPNVTLTISAARLYYYWERDYRRALCRLSQAGARVKIMDDEEFAYCWENFVYSEGQPFMPWYKFDDNYAFLHRTLKEILRNPMEAMYPHIFYFHFKNLRKAYGRNESWLCFTMEVVKHHSPVSWKRGVFRNQVDPETHCHAERCFLSWFCDDILSPNTNYEVTWYTSWSPCPECAGEVAEFLARHSNVNLTIFTARLYYFWDTDYQEGLRSLSQEGASVEIMGYKDFKYCWENFVYNDDEPFKPWKGLKYNFLFLDSKLQEILE

SEQ ID NO: 33 - protein, 370 aa, Macaca mulatta
  REGION 1..370: note = MISC_FEATURE - Rhesus macaque APOBEC-3G polypeptide sequence
  REGION 1..61: note = MISC_FEATURE - Cytoplasmic localization signal
MVEPMDPRTFVSNFNNRPILSGLNTVWLCCEVKTKDPSGPPLDAKIFQGKVYSKAKYHPEMRFLRWFHKWRQLHHDQEYKVTWYVSWSPCTRCANSVATFLAKDPKVTLTIFVARLYYFWKPDYQQALRILCQKRGGPHATMKIMNYNEFQDCWNKFVDGRGKPFKPRNNLPKHYTLLQATLGELLRHLMDPGTFTSNFNNKPWVSGQHETYLCYKVERLHNDTWVPLNQHRGFLRNQAPNIHGFPKGRHAELCFLDLIPFWKLDGQQYRVTCFTSWSPCFSCAQEMAKFISNNEHVSLCIFAARIYDDQGRYQEGLRALHRDGAKIAMMNYSEFEYCWDTFVDRQGRPFQPWDGLDEHSQALSGRLRAI

SEQ ID NO: 34 - protein, 384 aa, Pan troglodytes
  REGION 1..384: note = MISC_FEATURE - Chimpanzee APOBEC-3G polypeptide sequence
  REGION 1..60: note = MISC_FEATURE - Cytoplasmic localization signal
  REGION 65..100: note = MISC_FEATURE - Nucleic acid editing domain
  REGION 257..291: note = MISC_FEATURE - Nucleic acid editing domain
MKPHFRNPVERMYQDTFSDNFYNRPILSHRNTVWLCYEVKTKGPSRPPLDAKIFRGQVYSKLKYHPEMRFFHWFSKWRKLHRDQEYEVTWYISWSPCTKCTRDVATFLAEDPKVTLTIFVARLYYFWDPDYQEALRSLCQKRDGPRATMKIMNYDEFQHCWSKFVYSQRELFEPWNNLPKYYILLHIMLGEILRHSMDPPTFTSNFNNELWVRGRHETYLCYEVERLHNDTWVLLNQRRGFLCNQAPHKHGFLEGRHAELCFLDVIPFWKLDLHQDYRVTCFTSWSPCFSCAQEMAKFISNNKHVSLCIFAARIYDDQGRCQEGLRTLAKAGAKISIMTYSEFKHCWDTFVDHQGCPFQPWDGLEEHSQALSGRLRAILQNQGN

SEQ ID NO: 35 - protein, 377 aa, Chlorocebus sabaeus
  REGION 1..377: note = MISC_FEATURE - Green monkey APOBEC-3G polypeptide sequence
  REGION 1..60: note = MISC_FEATURE - Cytoplasmic localization signal
  REGION 65..100: note = MISC_FEATURE - Nucleic acid editing domain
  REGION 257..290: note = MISC_FEATURE - Nucleic acid editing domain
MNPQIRNMVEQMEPDIFVYYFNNRPILSGRNTVWLCYEVKTKDPSGPPLDANIFQGKLYPEAKDHPEMKFLHWFRKWRQLHRDQEYEVTWYVSWSPCTRCANSVATFLAEDPKVTLTIFVARLYYFWKPDYQQALRILCQERGGPHATMKIMNYNEFQHCWNEFVDGQGKPFKPRKNLPKHYTLLHATLGELLRHVMDPGTFTSNFNNKPWVSGQRETYLCYKVERSHNDTWVLLNQHRGFLRNQAPDRHGFPKGRHAELCFLDLIPFWKLDDQQYRVTCFTSWSPCFSCAQKMAKFISNNKHVSLCIFAARIYDDQGRCQEGLRTLHRDGAKIAVMNYSEFEYCWDTFVDRQGRPFQPWDGLDEHSQALSGRLRAI

SEQ ID NO: 36 - protein, 384 aa, Homo sapiens
  REGION 1..384: note = MISC_FEATURE - Human APOBEC-3G polypeptide sequence
  REGION 1..60: note = MISC_FEATURE - Cytoplasmic localization signal
  REGION 65..100: note = MISC_FEATURE - Nucleic acid editing domain
  REGION 257..291: note = MISC_FEATURE - Nucleic acid editing domain
MKPHFRNTVERMYRDTFSYNFYNRPILSRRNTVWLCYEVKTKGPSRPPLDAKIFRGQVYSELKYHPEMRFFHWFSKWRKLHRDQEYEVTWYISWSPCTKCTRDMATFLAEDPKVTLTIFVARLYYFWDPDYQEALRSLCQKRDGPRATMKIMNYDEFQHCWSKFVYSQRELFEPWNNLPKYYILLHIMLGEILRHSMDPPTFTFNFNNEPWVRGRHETYLCYEVERMHNDTWVLLNQRRGFLCNQAPHKHGFLEGRHAELCFLDVIPFWKLDLDQDYRVTCFTSWSPCFSCAQEMAKFISKNKHVSLCIFTARIYDDQGRCQEGLRTLAEAGAKISIMTYSEFKHCWDTFVDHQGCPFQPWDGLDEHSQDLSGRLRAILQNQEN

SEQ ID NO: 37 - protein, 382 aa, Homo sapiens
  REGION 1..382: note = MISC_FEATURE - Human APOBEC-3B polypeptide sequence
  REGION 66..100: note = MISC_FEATURE - Nucleic acid editing domain
  REGION 251..289: note = MISC_FEATURE - Nucleic acid editing domain
MNPQIRNPMERMYRDTFYDNFENEPILYGRSYTWLCYEVKIKRGRSNLLWDTGVFRGQVYFKPQYHAEMCFLSWFCGNQLPAYKCFQITWFVSWTPCPDCVAKLAEFLSEHPNVTLTISAARLYYYWERDYRRALCRLSQAGARVTIMDYEEFAYCWENFVYNEGQQFMPWYKFDENYAFLHRTLKEILRYLMDPDTFTFNFNNDPLVLRRRQTYLCYEVERLDNGTWVLMDQHMGFLCNEAKNLLCGFYGRHAELRFLDLVPSLQLDPAQIYRVTWFISWSPCFSWGCAGEVRAFLQENTHVRLRIFAARIYDYDPLYKEALQMLRDAGAQVSIMTYDEFEYCWDTFVYRQGCPFQPWDGLEEHSQALSGRLRAILQNQGN

SEQ ID NO: 38 - protein, 395 aa, Rattus sp.
  REGION 1..395: note = MISC_FEATURE - Rat APOBEC-3B polypeptide sequence
MQPQGLGPNAGMGPVCLGCSHRRPYSPIRNPLKKLYQQTFYFHFKNVRYAWGRKNNFLCYEVNGMDCALPVPLRQGVFRKQGHIHAELCFIYWFHDKVLRVLSPMEEFKVTWYMSWSPCSKCAEQVARFLAAHRNLSLAIFSSRLYYYLRNPNYQQKLCRLIQEGVHVAAMDLPEFKKCWNKFVDNDGQPFRPWMRLRINFSFYDCKLQEIFSRMNLLREDVFYLQFNNSHRVKPVQNRYYRRKSYLCYQLERANGQEPLKGYLLYKKGEQHVEILFLEKMRSMELSQVRITCYLTWSPCPNCARQLAAFKKDHPDLILRIYTSRLYFWRKKFQKGLCTLWRSGIHVDVMDLPQFADCWTNFVNPQRPFRPWNELEKNSWRIQRRLRRIKESWGL

SEQ ID NO: 39 - protein, 226 aa, Bos taurus
  REGION 1..226: note = MISC_FEATURE - Bovine APOBEC-3B polypeptide sequence
DGWEVAFRSGTVLKAGVLGVSMTEGWAGSGHPGQGACVWTPGTRNTMNLLREVLFKQQFGNQPRVPAPYYRRKTYLCYQLKQRNDLTLDRGCFRNKKQRHAERFIDKINSLDLNPSQSYKIICYITWSPCPNCANELVNFITRNNHLKLEIFASRLYFHWIKSFKMGLQDLQNAGISVAVMTHTEFEDCWEQFVDNQSRPFQPWDKLEQYSASIRRRLQRILTAPI

SEQ ID NO: 40 - protein, 490 aa, Pan troglodytes
  REGION 1..490: note = MISC_FEATURE - Chimpanzee APOBEC-3B polypeptide sequence
MNPQIRNPMEWMYQRTFYYNFENEPILYGRSYTWLCYEVKIRRGHSNLLWDTGVFRGQMYSQPEHHAEMCFLSWFCGNQLSAYKCFQITWFVSWTPCPDCVAKLAKFLAEHPNVTLTISAARLYYYWERDYRRALCRLSQAGARVKIMDDEEFAYCWENFVYNEGQPFMPWYKFDDNYAFLHRTLKEIIRHLMDPDTFTFNFNNDPLVLRRHQTYLCYEVERLDNGTWVLMDQHMGFLCNEAKNLLCGFYGRHAELRFLDLVPSLQLDPAQIYRVTWFISWSPCFSWGCAGQVRAFLQENTHVRLRIFAARIYDYDPLYKEALQMLRDAGAQVSIMTYDEFEYCWDTFVYRQGCPFQPWDGLEEHSQALSGRLRAILQVRASSLCMVPHRPPPPPQSPGPCLPLCSEPPLGSLLPTGRPAPSLPFLLTASFSFPPPASLPPLPSLSLSPGHLPVPSFHSLTSCSIQPPCSSRIRETEGWASVSKEGRDLG

SEQ ID NO: 41 - protein, 190 aa, Homo sapiens
  REGION 1..190: note = MISC_FEATURE - Human APOBEC-3C polypeptide sequence
  REGION 65..100: note = MISC_FEATURE - Nucleic acid editing domain
MNPQIRNPMKAMYPGTFYFQFKNLWEANDRNETWLCFTVEGIKRRSVVSWKTGVFRNQVDSETHCHAERCFLSWFCDDILSPNTKYQVTWYTSWSPCPDCAGEVAEFLARHSNVNLTIFTARLYYFQYPCYQEGLRSLSQEGVAVEIMDYEDFKYCWENFVYNDNEPFKPWKGLKTNFRLLKRRLRESLQ

SEQ ID NO: 42 - protein, 190 aa, Gorilla sp.
  REGION 1..190: note = MISC_FEATURE - Gorilla APOBEC-3C polypeptide sequence
  REGION 65..100: note = MISC_FEATURE - Nucleic acid editing domain
MNPQIRNPMKAMYPGTFYFQFKNLWEANDRNETWLCFTVEGIKRRSVVSWKTGVFRNQVDSETHCHAERCFLSWECDDILSPNTNYQVTWYTSWSPCPECAGEVAEFLARHSNVNLTIFTARLYYFQDTDYQEGLRSLSQEGVAVKIMDYKDFKYCWENFVYNDDEPFKPWKGLKYNFRFLKRRLQEILE

SEQ ID NO: 43 - protein, 202 aa, Macaca mulatta
  REGION 1..202: note = MISC_FEATURE - Rhesus macaque APOBEC-3A polypeptide sequence
  REGION 72..103: note = MISC_FEATURE - Nucleic acid editing domain
MDGSPASRPRHLMDPNTFTFNFNNDLSVRGRHQTYLCYEVERLDNGTWVPMDERRGFLCNKAKNVPCGDYGCHVELRFLCEVPSWQLDPAQTYRVTWFISWSPCFRRGCAGQVRVFLQENKHVRLRIFAARIYDYDPLYQEALRTLRDAGAQVSIMTYEEFKHCWDTFVDRQGRPFQPWDGLDEHSQALSGRLRAILQNQGN

SEQ ID NO: 44 - protein, 185 aa, Bos taurus
  REGION 1..185: note = MISC_FEATURE - Bovine APOBEC-3A polypeptide sequence
  REGION 56..86: note = MISC_FEATURE - Nucleic acid editing domain
MDEYTFTENFNNQGWPSKTYLCYEMERLDGDATIPLDEYKGFVRNKGLDQPEKPCHAELYFLGKIHSWNLDRNQHYRLTCFISWSPCYDCAQKLTTFLKENHHISLHILASRIYTHNRFGCHQSGLCELQAAGARITIMTFEDFKHCWETFVDHKGKPFQPWEGLNVKSQALCTELQAILKTQQN

SEQ ID NO: 45 - protein, 200 aa, Homo sapiens
  REGION 1..200: note = MISC_FEATURE - Human APOBEC-3H polypeptide sequence
  REGION 54..88: note = MISC_FEATURE - Nucleic acid editing domain
MALLTAETFRLQFNNKRRLRRPYYPRKALLCYQLTPQNGSTPTRGYFENKKKCHAEICFINEIKSMGLDETQCYQVTCYLTWSPCSSCAWELVDFIKAHDHLNLGIFASRLYYHWCKPQQKGLRLLCGSQVPVEVMGFPKFADCWENFVDHEKPLSFNPYKMLEELDKNSRAIKRRLERIKIPGVRAQGRYMDILCDAEV

SEQ ID NO: 46 - protein, 210 aa, Macaca mulatta
  REGION 1..210: note = MISC_FEATURE - Rhesus macaque APOBEC-3H polypeptide sequence
MALLTAKTFSLQFNNKRRVNKPYYPRKALLCYQLTPQNGSTPTRGHLKNKKKDHAEIRFINKIKSMGLDETQCYQVTCYLTWSPCPSCAGELVDFIKAHRHLNLRIFASRLYYHWRPNYQEGLLLLCGSQVPVEVMGLPEFTDCWENFVDHKEPPSFNPSEKLEELDKNSQAIKRRLERIKSRSVDVLENGLRSLQLGPVTPSSSIRNSR

SEQ ID NO: 47 - protein, 386 aa, Homo sapiens
  REGION 1..386: note = MISC_FEATURE - Human APOBEC-3D polypeptide sequence
  REGION 78..109: note = MISC_FEATURE - Nucleic acid editing domain
  REGION 262..296: note = MISC_FEATURE - Nucleic acid editing domain
MNPQIRNPMERMYRDTFYDNFENEPILYGRSYTWLCYEVKIKRGRSNLLWDTGVFRGPVLPKRQSNHRQEVYFRFENHAEMCFLSWFCGNRLPANRRFQITWFVSWNPCLPCVVKVTKFLAEHPNVTLTISAARLYYYRDRDWRWVLLRLHKAGARVKIMDYEDFAYCWENFVCNEGQPFMPWYKFDDNYASLHRTLKEILRNPMEAMYPHIFYFHFKNLLKACGRNESWLCFTMEVTKHHSAVFRKRGVFRNQVDPETHCHAERCFLSWFCDDILSPNTNYEVTWYTSWSPCPECAGEVAEFLARHSNVNLTIFTARLCYFWDTDYQEGLCSLSQEGASVKIMGYKDFVSCWKNFVYSDDEPFKPWKGLQTNFRLLKRRLREILQ

SEQ ID NO: 48 - protein, 236 aa, Homo sapiens
  REGION 1..236: note = MISC_FEATURE - Human APOBEC-1 polypeptide sequence
MTSEKGPSTGDPTLRRRIEPWEFDVFYDPRELRKEACLLYEIKWGMSRKIWRSSGKNTTNHVEVNFIKKFTSERDFHPSMSCSITWFLSWSPCWECSQAIREFLSRHPGVTLVIYVARLFWHMDQQNRQGLRDLVNSGVTIQIMRASEYYHCWRNFVNYPPGDEAHWPQYPPLWMMLYALELHCIILSLPPCLKISRRWQNHLTFFRLHLQNCHYQTIPPHILLATGLIHPSVAWR

SEQ ID NO: 49 - protein, 229 aa, Mus musculus
  REGION 1..229: note = MISC_FEATURE - Mouse APOBEC-1 polypeptide sequence
MSSETGPVAVDPTLRRRIEPHEFEVFFDPRELRKETCLLYEINWGGRHSVWRHTSQNTSNHVEVNFLEKFTTERYFRPNTRCSITWFLSWSPCGECSRAITEFLSRHPYVTLFIYIARLYHHTDQRNRQGLRDLISSGVTIQIMTEQEYCYCWRNFVNYPPSNEAYWPRYPHLWVKLYVLELYCIILGLPPCLKILRRKQPQLTFFTITLQTCHYQRIPPHLLWATGLK

SEQ ID NO: 50 - protein, 224 aa, Homo sapiens
  REGION 1..224: note = MISC_FEATURE - Human APOBEC-2 polypeptide sequence
MAQKEEAAVATEAASQNGEDLENLDDPEKLKELIELPPFEIVTGERLPANFFKFQFRNVEYSSGRNKTFLCYVVEAQGKGGQVQASRGYLEDEHAAAHAEEAFFNTILPAFDPALRYNVTWYVSSSPCAACADRIIKTLSKTKNLRLLILVGRLFMWEEPEIQAALKKLKEAGCKLRIMKPQDFEYVWQNFVEQEEGESKAFQPWEDIQENFLYYEEKLADILK

SEQ ID NO: 51 - protein, 224 aa, Mus musculus
  REGION 1..224: note = MISC_FEATURE - Mouse APOBEC-2 polypeptide sequence
MAQKEEAAEAAAPASQNGDDLENLEDPEKLKELIDLPPFEIVTGVRLPVNFFKFQFRNVEYSSGRNKTFLCYVVEVQSKGGQAQATQGYLEDEHAGAHAEEAFFNTILPAFDPALKYNVTWYVSSSPCAACADRILKTLSKTKNLRLLILVSRLFMWEEPEVQAALKKLKEAGCKLRIMKPQDFEYIWQNFVEQEEGESKAFEPWEDIQENFLYYEEKLADILK

SEQ ID NO: 52 - protein, 224 aa, Rattus sp.
  REGION 1..224: note = MISC_FEATURE - Rat APOBEC-2 polypeptide sequence
MAQKEEAAEAAAPASQNGDDLENLEDPEKLKELIDLPPFEIVTGVRLPVNFFKFQFRNVEYSSGRNKTFLCYVVEAQSKGGQVQATQGYLEDEHAGAHAEEAFFNTILPAFDPALKYNVTWYVSSSPCAACADRILKTLSKTKNLRLLILVSRLFMWEEPEVQAALKKLKEAGCKLRIMKPQDFEYLWQNFVEQEEGESKAFEPWEDIQENFLYYEEKLADILK

SEQ ID NO: 53 - protein, 208 aa, Petromyzon marinus
  REGION 1..208: note = MISC_FEATURE - Petromyzon marinus CDA1 (pmCDAl) polypeptide sequence
MTDAEYVRIHEKLDIYTFKKQFFNNKKSVSHRCYVLFELKRRGERRACFWGYAVNKPQSGTERGIHAEIFSIRKVEEYLRDNPGQFTINWYSSWSPCADCAEKILEWYNQELRGNGHTLKIWACKLYYEKNARNQIGLWNLRDNGVGLNVMVSEHYQCCRKIFIQSSHNQLNENRWLEKTLKRAEKRRSELSFMIQVKILHTTKSPAV

SEQ ID NO: 54 - protein, 381 aa, Homo sapiens
  REGION 1..381: note = MISC_FEATURE - Human APOBEC3G D316R D317R polypeptide sequence
MKPHFRNTVERMYRDTFSYNFYNRPILSRRNTVWLCYEVKTKGPSRPPLDAKIFRGQVYSELKYHPEMRFFHWFSKWRKLHRDQEYEVTWYISWSPCTKCTRDMATFLAEDPKVTLTIFVARLYYFWDPDYQEALRSLCQKRDGPRATMKFNYDEFQHCWSKFVYSQRELFEPWNNLPKYYILLHFMLGEILRHSMDPPTFTFNFNNEPWVRGRHETYLCYEVERMHNDTWVLLNQRRGFLCNQAPHKHGFLEGRHAELCFLDVIPFWKLDLDQDYRVTCFTSWSPCFSCAQEMAKFISKKHVSLCIFTARIYRRQGRCQEGLRTLAEAGAKISFTYSEFKHCWDTFVDHQGCPFQPWDGLDEHSQDLSGRLRAILQNQEN

SEQ ID NO: 55 - protein, 182 aa, Homo sapiens
  REGION 1..182: note = MISC_FEATURE - Human APOBEC3G chain A polypeptide sequence
MDPPTFTFNFNNEPWWGRHETYLCYEVERMHNDTWVLLNQRRGFLCNQAPHKHGFLEGRHAELCFLDVIPFWKLDLDQDYRVTCFTSWSPCFSCAQEMAKFISKNKHVSLCIFTARIYDDQGRCQEGLRTLAEAGAKISFTYSEFKHCWDTFVDHQGCPFQPWDGLDEHSQDLSGRLRAILQ

SEQ ID NO: 56 - protein, 184 aa, Homo sapiens
  REGION 1..184: note = MISC_FEATURE - Human APOBEC3G chain A D120R D121R polypeptide sequence
MDPPTFTFNFNNEPWVRGRHETYLCYEVERMHNDTWVLLNQRRGFLCNQAPHKHGFLEGRHAELCFLDVIPFWKLDLDQDYRVTCFTSWSPCFSCAQEMAKFISKNKHVSLCIFTARIYRRQGRCQEGLRTLAEAGAKISFMTYSEFKHCWDTFVDHQGCPFQPWDGLDEHSQDLSGRLRAILQ

SEQ ID NO: 57 - protein, 367 aa, Homo sapiens
  REGION 1..367: note = MISC_FEATURE - hAPOBEC-4 polypeptide sequence
MEPIYEEYLANHGTIVKPYYWLSFSLDCSNCPYHIRTGEEARVSLTEFCQIFGFPYGTTFPQTKHLTFYELKTSSGSLVQKGHASSCTGNYIHPESMLFEMNGYLDSAIYNNDSIRHIILYSNNSPCNEANHCCISKMYNFLITYPGITLSIYFSQLYHTEMDFPASAWNREALRSLASLWPRVVLSPISGGIWHSVLHSFISGVSGSHVFQPILTGRALADRHNAYEINAITGVKPYFTDVLLQTKRNPNTKAQEALESYPLNNAFPGQFFQMPSGQLQPNLPPDLRAPVVFVLVPLRDLPPMHMGQNPNKPRNIVRHLNMPQMSFQETKDLGRLPTGRSVEIVEITEQFASSKEADEKKKKKGKK

SEQ ID NO: 58 - protein, 388 aa, Rattus norvegicus
  REGION 1..388: note = MISC_FEATURE - rAPOBEC-4 polypeptide sequence
MEPLYEEYLTHSGTIVKPYYWLSVSLNCTNCPYHIRTGEEARVPYTEFHQTFGFPWSTYPQTKHLTFYELRSSSGNLIQKGLASNCTGSHTHPESMLFERDGYLDSLIFHDSNIRHIILYSNNSPCDEANHCCISKMYNFLMNYPEVTLSVFFSQLYHTENQFPTSAWNREALRGLASLWPQVTLSAISGGIWQSILETFVSGISEGLTAVRPFTAGRTLTDRYNAYEINCITEVKPYFTDALHSWQKENQDQKVWAASENQPLHNTTPAQWQPDMSQDCRTPAVFMLVPYRDLPPIHVNPSPQKPRTVVRHLNTLQLSASKVKALRKSPSGRPVKKEEARKGSTRSQEANETNKSKWKKQTLFIKSNICHLLEREQKKIGILSSWSV

SEQ ID NO: 59 - protein, 363 aa, Macaca fascicularis
  REGION 1..363: note = MISC_FEATURE - mfAPOBEC-4 polypeptide sequence
MEPTYEEYLANHGTIVKPYYWLSFSLDCSNCPYHIRTGEEARVSLTEFCQIFGFPYGTTYPQTKHLTFYELKTSSGSLVQKGHASSCTGNYIHPESMLFEMNGYLDSAIYNNDSIRHIILYCNNSPCNEANHCCISKVYNFLITYPGITLSIYFSQLYHTEMDFPASAWNREALRSLASLWPRVVLSPISGGIWHSVLHSFVSGVSGSHVFQPILTGRALTDRYNAYEINAITGVKPFFTDVLLHTKRNPNTKAQMALESYPLNNAFPGQSFQMTSGIPPDLRAPVVFVLLPLRDLPPMHMGQDPNKPRNIIRHLNMPQMSFQETKDLERLPTRRSVETVEITERFASSKQAEEKTKKKKGKK

SEQ ID NO: 60 - protein, 218 aa, Rattus norvegicus
  REGION 1..218: note = MISC_FEATURE - rAPOBEC-1 (delta 177-186) polypeptide sequence
MSSETGPVAVDPTLRRRIEPHEFEVFFDPRELRKETCLLYEINWGGRHSIWRHTSQNTNKHVEVNFIEKFTTERYFCPNTRCSITWFLSWSPCGECSRAITEFLSRYPHVTLFIYIARLYHHADPRNRQGLRDLISSGVTIQIMTEQESGYCWRNFVNYSPSNEAHWPRYPHLWVRGLPPCLNILRRKQPQLTFFTIALQSCHYQRLPPHILWATGLK

SEQ ID NO: 61 - protein, 218 aa, Rattus norvegicus
  REGION 1..218: note = MISC_FEATURE - rAPOBEC-1 (delta 202-213) polypeptide sequence
MSSETGPVAVDPTLRRRIEPHEFEVFFDPRELRKETCLLYEINWGGRHSIWRHTSQNTNKHVEVNFIEKFTTERYFCPNTRCSITWFLSWSPCGECSRAITEFLSRYPHVTLFIYIARLYHHADPRNRQGLRDLISSGVTIQIMTEQESGYCWRNFVNYSPSNEAHWPRYPHLWVRLYVLELYCIILGLPPCLNILRRKQPQHYQRLPPHILWATGLK

SEQ ID NO: 62 - protein, 198 aa, Mus musculus
  REGION 1..198: note = MISC_FEATURE - mouse cytidine deaminase polypeptide sequence
  REGION 1..30: note = MISC_FEATURE - Nuclear localization sequence
  REGION 183..198: note = MISC_FEATURE - Nuclear export signal
MDSLLMKQKKFLYHFKNVRWAKGRHETYLCYVVKRRDSATSCSLDFGHLRNKSGCHVELLFLRYISDWDLDPGRCYRVTWFTSWSPCYDCARHVAEFLRWNPNLSLRIFTARLYFCEDRKAEPEGLRRLHRAGVQIGIMTFKDYFYCWNTFVENRERTFKAWEGLHENSVRLTRQLRRILLPLYEVDDLRDAFRMLGF

SEQ ID NO: 63 - protein, 224 aa, Petromyzon marinus
  REGION 1..224: note = MISC_FEATURE - pmCDA-1 polypeptide sequence
MAGYECVRVSEKLDFDTFEFQFENLHYATERHRTYVIFDVKPQSAGGRSRRLWGYIINNPNVCHAELILMSMIDRHLESNPGVYAMTWYMSWSPCANCSSKLNPWLKNLLEEQGHTLTMHFSRIYDRDREGDHRGLRGLKHVSNSFRMGVVGRAEVKECLAEYVEASRRTLTWLDTTESMAAKMRRKLFCILVRCAGMRESGIPLHLFTLQTPLLSGRVVWWRV

SEQ ID NO: 64 - protein, 331 aa, Petromyzon marinus
  REGION 1..331: note = MISC_FEATURE - pmCDA-2 polypeptide sequence
MELREVVDCALASCVRHEPLSRVAFLRCFAAPSQKPRGTVILFYVEGAGRGVTGGHAVNYNKQGTSIHAEVLLLSAVRAALLRRRRCEDGEEATRGCTLHCYSTYSPCRDCVEYIQEFGASTGVRVVIHCCRLYELDVNRRRSEAEGVLRSLSRLGRDFRLMGPRDAIALLLGGRLANTADGESGASGNAWVTETNVVEPLVDMTGFGDEDLHAQVQRNKQIREAYANYASAVSLMLGELHVDPDKFPFLAEFLAQTSVEPSGTPRETRGRPRGASSRGPEIGRQRPADFERALGAYGLFLHPRIVSREADREEIKRDLIVVMRKHNYQGP

SEQ ID NO: 65 - protein, 209 aa, Petromyzon marinus
  REGION 1..209: note = MISC_FEATURE - pmCDA-5 polypeptide sequence
MAGDENVRVSEKLDFDTFEFQFENLHYATERHRTYVIFDVKPQSAGGRSRRLWGYIINNPNVCHAELILMSMIDRHLESNPGVYAMTWYMSWSPCANCSSKLNPWLKNLLEEQGHTLMMHFSRIYDRDREGDHRGLRGLKHVSNSFRMGVVGRAEVKECLAEYVEASRRTLTWLDTTESMAAKMRRKLFCILVRCAGMRESGMPLHLFT

SEQ ID NO: 66 - protein, 158 aa, Saccharomyces cerevisiae
  REGION 1..158: note = MISC_FEATURE - yCD polypeptide sequence
MVTGGMASKWDQKGMDIAYEEAALGYKEGGVPIGGCLINNKDGSVLGRGHNMRFQKGSATLHGEISTLENCGRLEGKVYKDTTLYTTLSPCDMCTGAIIMYGIPRCVVGENVNFKSKGEKYLQTRGHEVVVVDDERCKKIMKQFIDERPQDWFEDIGE

SEQ ID NO: 67 - protein, 194 aa, synthetic construct
  REGION 1..194: note = cytidine deaminase polypeptide sequence
MKPQIRDHRPNPMEAMYPHIFYFHFENLEKAYGRNETWLCFTVEIIKQYLPVPWKKGVFRNQVDPETHCHAEKCFLSWFCNNTLSPKKNYQVTWYTSWSPCPECAGEVAEFLAEHSNVKLTIYTARLYYFWDTDYQEGLRSLSEEGASVEIMDYEDFQYCWENFVYDDGEPFKRWKGLKYNFQSLTRRLREILQ

SEQ ID NO: 68 - protein, 192 aa, synthetic construct
  REGION 1..192: note = cytidine deaminase polypeptide sequence
MADSSEKMRGQYISRDTFEKNYKPIDGTKEAHLLCEIKWGKYGKPWLHWCQNQRMNIHAEDYFMNNIFKAKKHPVHCYVTWYLSWSPCADCASKIVKFLEERPYLKLTIYVAQLYYHTEEENRKGLRLLRSKKVIIRVMDISDYNYCWKVFVSNQNGNEDYWPLQFDPWVKENYSRLLDIFWESKCRSPNPW

SEQ ID NO: 69 - protein, 280 aa, synthetic construct
  REGION 1..280: note = cytidine deaminase polypeptide sequence
MDPQRLRQWPGPGPASRGGYGQRPRIRNPEEWFHELSPRTFSFHFRNLRFASGRNRSYICCQVEGKNCFFQGIFQNQVPPDPPCHAELCFLSWFQSWGLSPDEHYYVTWFISWSPCCECAAKVAQFLEENRNVSLSLSAARLYYFWKSESREGLRRLSDLGAQVGIMSFQDFQHCWNNFVHNLGMPFQPWKKLHKNYQRLVTELKQILREEPATYGSPQAQGKVRIGSTAAGLRHSHSHTRSEAHLRPNHSSRQHRILNPPREARARTCVLVDASWICYR

SEQ ID NO: 70 - protein, 555 aa, synthetic construct
  REGION 1..555: note = pYY-BEM3.1; tr|F7B644|F7B644_HORSE polypeptide sequence
MPRGRARERQRRNPMEKLDAEAFSFHFLNMEFVYDRNCSYLCYQVEGRLSGSPVLSEQGVFPNEVCGKTRRHAELCFLDWFRGRLSPDEYYCVTWFISWSPCSNCAREVAEFLKRHRNVELSIFAARLYYCRDHEQGLQSLCNRGAQLAVMLRKDFTYCWDNFVHNSGREFSPWENIDANSDLLARKLEDLLKNPMEKLHRKTFSFHFRNLKFAKGRKCSYLCYRVEGRLSGSPGLSEQGVFLNEVCDENCRHAELCFLHWFRGRLSPHADYRVTWFISWSPCSNCAREVAEFLKQHRNVELHISAARLYYWQRNKPGLRNLRSSGAQLAIMFFWDFRDCWDNFVHNSGRHFIPWKKINVNSRLLATKLEDLLKNPLEKLHPNTFSFHFCNLEFAYDRKYSYLCYQVEGRLSGSPGLSEQGVFLNEVCGKTRCHAELCFLDWFRVRLSPDEYYRVTWFISWSPCFYCAREVADFLKQYRNVKLSIFAARLYYCRDHAQGLRSLCSSGAQLAIMFFWDFRYCWDNFVHNSGREFRPWKKINVNSRLLATKLEDILK

SEQ ID NO: 71 - protein, 437 aa, synthetic construct
  REGION 1..437: note = pYY-BEM3.2; tr|D1LZA1|D1LZA1_PANTI polypeptide sequence
MEPWRPSPRNPMDRIDPKTFRFQFPNLRYASGRKLCYLCFQVERDYFYYNDSDWGVFRNEVHPWAPCHAEQCFLSWFRDQYPYRDEDYNVTWFLSWSPCPTCAEEVVEFLEEYRNLTLSIFTSRLYYFWHPNYQEGLCKLWDAGVQLDIMSCDEFEYCWDNFVYHKGMRFQRRNLLKDYDFLAAKLQEILSPGQQRKRDWPFPPRPGAQVDPRSWVQEVTEPGINTRRHPLHLLVSFLLPRPTMNPLQEDIFYRQFGNQHRVPKPYYYRRKTYLCYQLKLPEGTLIDKDCLRNKKKRHAEICFIDKIKSLTRDTSQRFEIICYITWSPCPFCAEELVAFVKDNPHLSLRIFASRLYVHWRWKYQQGLRHLHASGIPVAVMSLPEFEDCWRNFVDHQDRLFQPWRNLDQYSESIKRRLGKILTPLNDLRNDFRNLKLE

SEQ ID NO: 72 - protein, 440 aa, synthetic construct
  REGION 1..440: note = pYY-BEM3.3; tr|A0A3Q0DM17|A0A3Q0DM17_TARSY polypeptide sequence
MPMKRMYSNIYFDHFNNQRLLSGQNAPWLCFKVERVENCMLVPLETGVFGNQVSGCCGKTERPVEPTSLTRSVLVSPNPGTELRAQQPSRKGHLGKLGCVEYPSPGLALVMLGYGASTYCPDSSMYCPETCHHPEMCFLYWFEKTLSHEEQYQITWYVSWSPCVNCAEEVAEFLSVHPKVNLTIYAARLYCYQKLNHRQGLRRLCKEGACVKIMNYEEFDHCWENFVYNNYKSFKPWVKLQDNYELLATELDKILRIPMERMPQKKFRFHFQNLIAKDRNTTWLCFEVKNVRKKHPPDLLERGIFQNQVTPRINCHAEMCFLSWFLENMLLHGKRYQVTWYISWSPCSICAEEVAEFLSAHPKVSLTIYAARLYYFWVPGYRQGLRRLVEEGARVEIMNYEEFDYCWENFVSINNEPFQPWEGLHEKYGYLVTKLNNILG

SEQ ID NO: 73 - protein, 453 aa, synthetic construct
  REGION 1..453: note = pYY-BEM3.4; tr|A0A3Q0DNJ5|A0A3Q0DNJ5_TARSY polypeptide sequence
MEDNPEPRPRQQMDQDTFIFNFNNDPSVRGRHQTFLCYEVEHLDDDTWVPQDKYLGFLHNQPQSRSNAYCAYHAELCFLELVSSWQLDPAQRYRVTCFISWSPCSSCAQEVAAFLKKNRHVTLRILAARIYDYYQGYEDGLRTLQGVGVDITVMTSAEFGHCWNTFVDHQGSPFQPWEGLDQHSQVIWQRMQDILQVIPAKYLMEKVKYTVTVDILFKGRVPGPRYLMDQNTFTRNFINNLSVSGRRQTLLCYEVERLGGDIWVPLDQLRGFLLSQARDVLNYYQGRHAEPCFLDLVSSWQLDPAQHYRVTWFISWSPCTSCAQAVAAFLRENRHVTLRILAARIYDYHQGYEEGLRTLQRTGAHIDIMTFKEFGHCWNTFVNHKGSPFKSWTGLDQHSQALRKRLQDILHTMASSLWDQSEPKKPIPSQEVTLPESIPPSHGNRFRLVKRPS

SEQ ID NO: 74 - protein, 424 aa, synthetic construct
  REGION 1..424: note = pYY-BEM3.5; tr|G5AYU5|G5AYU5_HETGA polypeptide sequence
FCFLSCVHRKPIERIYKKAFRFYFRNLRCAYGRNKTFLCYEVKRERDNKVLHKGVVLNQVEPYMPLHAELRFLSWFHDTLLCPLGSYQVTLYVSWSPCSECAEELTTFLAGHRNVTMTIYVAQLYYCNWKSPNREGLKILIAEDARLRVMFYDEFLYCWRNFVKNDYNNFDPWSLLDENSRYHNRILQNILKGWGRPHRVGPEGEQTATPGGSGGHCISVFSLLRRREMTLKEETFRVQFNNAYKAPKPYRRRVTYLCYQLQEANGDPLTKGCLRTKKGYHAESRFIKRICSMDLGQDQSYQVTCFLTWSPCPHCAQELVSFKRAHPHLRLQIFTARLFFHWKRSYQEGLQRLCRAQVPVAVMGHPEFAYCWDNFVDHQPGPFEPPWAKLEYYSSCLKRRLQQILRSWGVDDLTNDFRNLQLGP

SEQ ID NO: 75 - protein, 385 aa, synthetic construct
  REGION 1..385: note = pYY-BEM3.6; tr|A0A2Y9QMV5|A0A2Y9QMV5_TRIMA polypeptide sequence
MLSSPQTPGTRKPMKTLAPDEFSFNFENLRLAHGRNTTFLCFQVETKAPPSLNSPDSGIFQNQDHCPSHHHAEMVFLTWFQKRLSPAQHYEVTWYMSWSPCSRCAVQVAKFLKSNSTVNLSIFVARLYYPRELETKDGLHSLWQAGAQVQIMFFQDFKYCWENFVNNEGKPFQPWKNLDENSKDWDTELKDIHRNTTDLLTEEMFYSQFYNREKKSSIPRKTYLCYQLNEPQPVKRCLHYKKGYHAVTRFIDGIVSMNLDPARSYDITCYFTWSPCNRYARKLVSFIEDYPNLRLKVYTSRLYFHWCWTNMQGLQHLQNSRVTVAVMTFRDFEYCWKNFVDNQGKPFEPWEKLDLYSQSTERRLRRILKPLTPDVLNEDFGNLHL

SEQ ID NO: 76 - protein, 381 aa, synthetic construct
  REGION 1..381: note = pYY-BEM3.7; tr|H0XHI0|H0XHI0_OTOGA polypeptide sequence
LSCAFRDPMNRMYPKTFCQNFEKEPCPSNQNSSWLCFEVETKNSAVFFHRGVFRNQPAPPPRAPTSVLLSQGPVKTPCHAEECFLTWIQGVLPPDHHYHVTWYVSRGPCANCANLIVHFLAMHRRVTLTIFAAHLNFFWESDFQQGLLRMDQEGVQLHIMGYEEFEYCWDNFVYNQRKQFVPWNGLNENYEFMVSTLEDILRSPLDRIRQKDFSIHFRNSLWLDDKSTWLCFEVKRTKSPVPLYRGVFRNQSPPKTPCHAEVRFFTWLQDLPPDFCCQFTWYLSWSPCADCADLVANFLAKHRNVSLTIFVARLYYYRDPEMHRGLRRMYQEGANVDIMSVIEFEYCWDNFVYNQGKQFVPWNGLNENYEFLVPRLQEILE

SEQ ID NO: 77 - protein, 337 aa, synthetic construct
  REGION 1..337: note = pYY-BEM3.8; tr|A0A3M0K4Y7|A0A3M0K4Y7_HIRRU polypeptide sequence
MYISKKALRRHFDPRVYPRETYLLCELQWEGSRRVWIHWIRNVPDHHAEEYFLEEVFEPRNYGFCNITLYLSWSPCCTCCSKIRDFLKRNPNVKIDIRVARLIYPDYAETRSSLRELNGLQRVSIQVMEAAGLSCIESKNHRISQVERDPKGSSSPTLFTLQDHLKLSNMTESVIQDSVSIQICYQMRILGFQCHIRWKLQPEDFQRNYSPNQIGRVVYLLYEVRWRRGSIWRNWCSNNPEQHAEVNFLENHFHHRPQTPCSITWFLSTSPCGKCSRRILEFLKSQPNVTLEIYAAKLFRHHDIRNRQGLRNLMMNGVTIYIMNLEGNPASLCLSVD

SEQ ID NO: 78 - protein, 237 aa, synthetic construct
  REGION 1..237: note = pYY-BEM3.9; tr|A0A3P4LUZ8|A0A3P4LUZ8_GULGU polypeptide sequence
MSFEDYEYCWETFVDHKGMYFQSWDLLRDNDLLAAELKNILRSTMNPLRQEIFYHQFGNQPRAPRPYHRRKTYLCYQLQPHEGPITARVCLQNKKKRHAEIRFIDNIRALRLDRSQTFEITCYLTWSPCPTCAKALAVFVQDHPHISLRLFASRLFIHWCWKYQEGLRLLHRSRIPVAVMRLQEFEDCWRNFVDNQDEPFQPWNKLEQYSESITRRLRRILGHPQNNLENDFRNLHI

SEQ ID NO: 79 - protein, 221 aa, synthetic construct
  REGION 1..221: note = pYY-BEM3.10; tr|G5BPM8|G5BPM8_HETGA polypeptide sequence
RRRIEPWQFEASFDPRQLRRETCLLSEVRWGTSPRAWRGCSLNTARHAEVSFMDRLTSEGRLRGPVRCSITWFLSWSPCGACAQAIGEFLRQHPNVSLVIYIARLFWHVDEQNRQGLRDLVTRGVRMQVMSDPEFAHCWRNFVNYSPGQEARWPQVPPVWTWLYSLELHCILLNLPPCLKISRRHHNQLTFFQLILQNCHYQAIPSPVLLASGLIHPFVTW

SEQ ID NO: 80 - protein, 211 aa, synthetic construct
  REGION 1..211: note = pYY-BEM3.11; tr|H2M862|H2M862_ORYLA polypeptide sequence
MITKLDSVLLPKKKFIYHYKNMRWARGRHETYLCFVVKRRVGPESLSFDFGHLRNRNGCHVELLFLRHLSALCPGLWGYGATGQGRVSYSITWFCSWSPCANCSFRLAQFLSQTPNLRLRIFVSRLYFCDLEDSREREGLRMLKKVGVHITVMSYKDYFYCWQTFVARKQSKFKPWDGLHQNSVRLSRKLNRILQPCETEDFRDAFKLLGL

SEQ ID NO: 81 - protein, 353 aa, synthetic construct
  REGION 1..353: note = pYY-BEM3.12; tr|H0Y0C6|H0Y0C6_OTOGA polypeptide sequence
MYLKTFYRHFNNRPYLSRRNDTWLCFEVKTTSSNSPGSFYSGVFRNQGPRYCPWHTELCFLTWVRPIVSHHHFYQITWYMSWSPCANCAWQVATFLATHENVSLTNYTVRIYYFWRQDYRQGLLRMIEEGTQVYVMSSKEFQHCWENFVDHWGTRWVTCWNRLKKNYEFLVTRLSEILSDPKERISPNTFYNQFNNTPVPRGRKDTWLCFEVKEKNSNSPGSFHRGVFQNQVFSGTSSHARRCPPDHHYEVTWYTSWSPCAHCAWHVVNFLTSNPNVSLTIFAARLYYIYRPEIQQGLRRVFQEGAKVHIMSLKEFKYCWAKLVYNSGMRFMPWYQFNFNFLFPNTTLKGDLH

SEQ ID NO: 82 - protein, 189 aa, synthetic construct
  REGION 1..189: note = pYY-BEM3.13; tr|A0A3Q2Z5X6|A0A3Q2Z5X6_HIPCM polypeptide sequence
MDVHFMNFIYHYKNMRWAKGRNETYLCFVVKRRVGPNSLTFDFGHLRNRNGCHVELLFLRYLGRRLSYSITWFCSWSPCANCSAALSQFLSRMPNLRLRIFVARLYFCDMEDSHEREGLRLLQKAGVQVTVMSYKDYYYCWQTFVDRKKSHFKAWEDLHQNSVRLSRKLNRILQPCEMDLRDAFKLLGL

SEQ ID NO: 83 - protein, 190 aa, synthetic construct
  REGION 1..190: note = pYY-BEM3.15; tr|A0A2K6NY90|A0A2K6NY90_RHIRO polypeptide sequence
MNPHIRNPMEAMYPGTFYFHFKNLWEADNRNESWLCFAVEVIKHHSTVSWKRGVFRNQVDPETHCHAEKCFLSWFCDNTLSPKKNYQVTWYTSWSPCPECAREVAKFLARHSNVMLTIYTARLYYSQYPNYQEGLRRLNEEGVPVEIMDYEDFKYCWENFVYNGDELFKPWKGLKYNFLFLDSKLQEILE

SEQ ID NO: 84 - protein, 202 aa, synthetic construct
  REGION 1..202: note = pYY-BEM3.16; tr|Q6ICH2|Q6ICH2_HUMAN polypeptide sequence
MNPQIRNPMERMYRDTFYDNFENEPILYGRSYTWLCYEVKIKRGRSNLLWDTGVFRGPVLPKRQSNHRQEVDPETHCHAERCFLSWFCDDILSPNTNYEVTWYTSWSPCPECAGEVAEFLARHSNVNLTIFTARLCYFWDTDYQEGLCSLSQEGASVKIMGYKDFVSCWKNFVYSDDEPFKPWKGLQTNFRLLKRRLREILQ

SEQ ID NO: 85 - protein, 202 aa, synthetic construct
  REGION 1..202: note = pYY-BEM3.17; tr|G8GPV1|G8GPV1_CERNE polypeptide sequence
MDGSPASRPGHVMDPGTFTSNFNNKPWVSGQRETYLCYKVERSHNDTWVLLNQHRGFLRNQAKNRLHGDYGCHAELCFLGEVPSWRLDPTQTYRVTWFISWSPCFSGGCAEQVRAFLQENTHVRLRIFAARIYDYDFLYQEALRTLRDAGAQVSIMTYEEFKHCWDTFVDHQGRPFQPWDGLDEHSQALSGRLQAILQNQGN

SEQ ID NO: 86 - protein, 181 aa, synthetic construct
  REGION 1..181: note = pYY-BEM3.18; tr|Q1WBT6|Q1WBT6_SYMSY polypeptide sequence
MALLTAKTFRLQFNNKRRVTKPYYPRKALLCYQLTPQNGSTPTRGYFKNKKKRHAEIRFINKIKSMGLDETQCYQVTCYLTWSPCPSCAWELVDFIKAHDHLNLGIFASRLYYHWCRHQQEGLRLLCGSQVPVEVMGFPEFADCWENFVDHEEPLSFNPSEMLEELDKNSRAIKRRLEKIK

SEQ ID NO: 87 - protein, 211 aa, synthetic construct
  REGION 1..211: note = pYY-BEM3.19; tr|A0A3B4CS14|A0A3B4CS14_PYGNA polypeptide sequence
MDNTNRRKFIYHYKNVRWARGRHETYLCFVVKKRNSPDSLSFDFGHLRNRNGCHVELLFLRYIEVLCPGLWGSGVDGVRVSYAVTWFCSWSPCSNCAQRLTNFLSQTPNLRLRIFVARLYFCDEEDSLEREGLRHLQRAGVQITVMTYKDFFYCWQTFVASRERCFKAWEGLRQNSVRLSRKLNRILQVFISTPVISPLITTHLGQSWAGG

SEQ ID NO: 88 - protein, 315 aa, synthetic construct
  REGION 1..315: note = pYY-BEM3.20; tr|A0A087XZI4|A0A087XZI4_POEFO polypeptide sequence
RKVSYSVTWFCSWSPCANCSIRLAQFLHQTPNLRLRIFVSRLYFCDLEDSREREGLRILKKAGVHITVMSYKDYFYCWQTFVAKSQSKFKPWDGLHQNYIRLSRKLNRILQPALDIKKFIYHYKNLRWARGRCETYLCFVVKKKLHLFMFVIVGRNRLFDLNVTMNNKSLYLIPLHLQLLFLRHLGALCPGLWGYGVTGERKVSYSVTWFCSWSPCANCSIRLAQFLHQTPNLRLRIFVSRLYFCDLEDSREREGLRILKKAGVHITVMSYKDYFYCWQTFVAKSQSKFKPWDGLHQNYIRLSRKLNRILQVQFF

SEQ ID NO: 89 - protein, 189 aa, synthetic construct
  REGION 1..189: note = pYY-BEM3.21; tr|A0A341AEK4|A0A341AEK4_9CETA polypeptide sequence
MASDRGPSAGDATSRRRIEPWEFEVSFDPRELCKETRLLYEIKWGRSQHVWRHSGKNTTNHVECNFIEKFTSERPFHRSVSCCITWFLSWSPCWECSKAIREFLNQHPRVTLFIYVARLFQHMDPQNRQGLRDLIHSGVTIQIMGPTEYDYCWRNFVNYPPGKEAHWPRYPPPLMKLYALELHCIILVP

SEQ ID NO: 90 - protein, 180 aa, synthetic construct
  REGION 1..180: note = pYY-BEM3.22; tr|E2D879|E2D879_MUSMI polypeptide sequence
RNLISRETFNFNFENLCYAKGRKNTFLCYEVTRKDCDSPVSLCHGVFKNKGSIHAEICFLYWFHDKVLKVLTPREEFKVTWYMSWSPCFECAEQVVRFLATHHNLNLTIFSSRLYNVSDPDTQQKLCRLVQEGAQVAVMDLSEFKKCWEKFVDNDGQQFRPWKRLRTNFRYQNSKLQEIL

SEQ ID NO: 91 - protein, 221 aa, synthetic construct
  REGION 1..221: note = pYY-BEM3.23; tr|A0A2K5RDN6|A0A2K5RDN6_CEBCA polypeptide sequence
MWEAQSPGLSREWGSVAISPEDPGPLHIGRFLSCAFRHPMNAMYPGIFNFHFRNLRKAYGRNETWLCFTVEGIMNRSTVSWKSGVFRNQVGSDPFCHAEMCFLSWFRHNMLSPKKDYEVTWYASWSPCPECAGQVAEFLARHGNVRLTIFTAHLYYFWNPSFRQGLRRLSQEGASVLIMGYEDFEYCWDNFVYNDGQPFKPWKRLQDNSLSLYITLQEILQ

SEQ ID NO: 92 - protein, 206 aa, synthetic construct
  REGION 1..206: note = pYY-BEM3.24; tr|A0A2K5RDN7|A0A2K5RDN7_CEBCA polypeptide sequence
MEASPASRPRPLMGPRTFTENFTNNPEVFGRHQTYLCYEVKCQGPDGTRDLMTEQRDFLCNQARNLLSGFDGRHAERCFLDRVPSWRLDPAQTYRVTCFISWSPCFSCAREVAEFLQENPHVNLRIFAARIYDCRPRYEEGLQMLQNAGAQVSIMTSEEFRHCWDTFVDHQGHPFQPWEGLDEHSQALSRRLQAILQGNRWMILSL

SEQ ID NO: 93 - protein, 184 aa, synthetic construct
  REGION 1..184: note = pYY-BEM3.25; tr|A0A1C9CJ69|A0A1C9CJ69_CERAL polypeptide sequence
NPMKAMDPHIFYFHFKNLRKAYGRNETWLCFAVEIIKQRSTVPWRTGVFRNQVDPESHCHAERCFLSWFCEDILSPNTDYRVTWYTSWSPCLDCAGEVAEFLARHSNVELAIFAARLYYFWDTHYQQGLRSLSEKGASVEIMGYEDFKYCRENFVCDDGKPFKPWKGLKTNFRFLKRRLQEILE

SEQ ID NO: 94 - protein, 197 aa, synthetic construct
  REGION 1..197: note = pYY-BEM3.26; tr|A0A2R2Z4D2|A0A2R2Z4D2_PTEAL polypeptide sequence
MHLQVWRKVTEAWREGYTLKPWSRNPMERLYHDYFYFHFYNLPTPKHRNGCYICYQVEGTKKHSRMPLLRGVFENQESLDMMLSPGEKYRVTWYISWSPCFACVDEVIKFLREHTNVELIIFAARLYHSDILQYRQGLRKLHDAGVHVAIMSYYEFKHCLNDFVFHQGRSFCPWNDLNKNSKNLSNTLEDILRNQED

SEQ ID NO: 95 - protein, 206 aa, synthetic construct
  REGION 1..206: note = pYY-BEM3.27; tr|B7T161|B7T161_SHEEP polypeptide sequence
MTEGWAGSGLPGRGDCVWTPQTRNTMNLLRETLFKQQFGNQPRVPPPYYRRKTYLCYQLKELDDLMLDKGCFRNKKQRHAEIRFIDKINSLNLNPSQSYKIICYITWSPCPNCASELVDFITRNDHLNLQIFASRLYFHWIKPFCRGLHQLQKAGISVAVMTHTEFEDCWEQFVDNQLRPFQPWDKLEQYSASIRRRLQRILTAPT

SEQ ID NO: 96 - protein, 205 aa, synthetic construct
  REGION 1..205: note = pYY-BEM3.28; tr|A0A2R2X2G4|A0A2R2X2G4_PTEAL polypeptide sequence
MAGLGQACEGCCGQMPEISYPMGRLDPKTFSFEFKNLPYAYGRKSSYLCFQVEREQHSSPVPSDWGVFKNQFCGTEPYHAELCFLNWFRAEKLSPYEHYDVTWFLSWSPCSTCAEEIAIFLSNHKNVRLNIFVSRIYYFWKPAFRQGLQELDHLGVQLDAMSFDEFKYCWENFVDNQGMPFRCWKKVHQNYKSVLRKLNEILRRR

SEQ ID NO: 97 - protein, 309 aa, synthetic construct
  REGION 1..309: note = pYY-BEM3.29; tr|G1Q1M4|G1Q1M4_MYOLU polypeptide sequence
YAELSFLDLFQSWNLDRGRQYRLTWYMSWSPYPDCAQKLVEFLGENSHVTLRIFAADIHSLCSGYEDGLRKLRDARAQLAIMTRDELQYCWVTFVDNQGQPFRPWPNLVEHIKTKKQELKDILGNPMRRMYPKTFNFNFQNLNSYGRKSTFLCFEVETWEDGSVLDYQNGVFQNQLDPGHAELCFIEWFHEKVLFPDEVRCPDAQYHVTWYISWSPCFECAEQVAGFLNEHENVDLSISAARLYLCEDEDEQGLQDLVAAGAKVAMMAPEDFEYCWDNFVYNRGWPFTYWKHVRRNYGRLQEKLDEILW

SEQ ID NO: 98 - protein, 216 aa, synthetic construct
  REGION 1..216: note = pYY-BEM3.30; tr|A0A1S3AN78|A0A1S3AN78_ERIEU polypeptide sequence
RRIEPWEFEDFFDPRQFRPETCLLYEVRWGSSRNAWRSTARNTTRHAEVNFLERFAAERHFDKPVSCSITWFLSWSPCWECSQAIGAFLSQHPQVTLAIHVTRLFHHEDEQNRQGLRDLLARGVTLQVMGDSEYAHCWRTFVNSPPGAEGHYPRYPSDFTRLYALELHCIILGLPPCLEILRRYQNQFTLFRLVPQNCHYQMIPHLNFFVVRHYFF

SEQ ID NO: 99 - protein, 201 aa, synthetic construct
  REGION 1..201: note = pYY-BEM3.32; tr|Q4VUI3|Q4VUI3_XENLA polypeptide sequence
MTMDSMLLKRNKFIYHYKNLRWARGRHETYLCYIVKRRYSSVSCALDFGYLRNRNGCHAEMLFLRYLSIWVGHDPHRNYRVTWFSSWSPCYDCAKRTLEFLKGHPNFSLRIFSARLYFCEERNAEPEGLRKLQKAGVRLSVMSYKDYFYCWNTFVETRESGFEAWDGLHENSVRLARKLRRILQPPYDMEDLREVFVLLGL

SEQ ID NO: 100 - protein, 191 aa, synthetic construct
  REGION 1..191: note = pYY-BEM3.33; tr|E2RL86|E2RL86_CANLF polypeptide sequence
MNPLQEETFYQQFSNQRVPKPTYQRRTYLCYQLKPHEGSVIAKVCLQNQEKRHAEICFIDDIKSRQLDPSQKFEITCYVTWSPCPTCAKKLIAFVNDHPHISLRLFASRLYFHWRQKYKRELRHLQKSGIPLAVMSYLEFKDCWEKFVDHKGRPFQPWNKLKQYSESIGRRLQRILQPLNNLENDFRNLRL

SEQ ID NO: 101 - protein, 226 aa, synthetic construct
  REGION 1..226: note = pYY-BEM3.34; tr|G1LWB0|G1LWB0_AILME polypeptide sequence
SSAAPASIHLLDEDTFTENFRNDDWPSRTYLCYKVEGPDQGSGVPLGQDKGILHNKPAQGPEPSRHAECYLLEQIQSWNLDPKLHYGVTCFLSWSPCAKCAQKMARFLQENSHVSLKLFASRLYTRERWDEDYKEGLRTLKRAGASIAIMTYREFEHCWKTFVLHDQEGSCFQPWPFLHKESQKFSEKLQAILQVGVLLLSLPPPLPSSPLSSPWPFPAPLRASTG

SEQ ID NO: 102 - protein, 238 aa, synthetic construct
  REGION 1..238: note = pYY-BEM3.35; tr|A0A1U7S7K7|A0A1U7S7K7_ALLSI polypeptide sequence
MGEHWQYAGSGEYIPQDQFEENFDPSVLLAETHLLSELTWGGRPYKHWYENTEHCHAEIHFLENFSSKNRSCTITWYLSWSPCAECSARIADFMQENTNVKLNIHVARLYLHDDEHTRQGLRYLMKMKRVTIQVMTIPDYTYCWNTFLEDDGEDESDDYGGYAGVHEDEDESDDDDYLPTHFAPWIMLYSLELSCILQGFAPCLKIIQGNHMSPTFQLHVQDQEQKRLLEPANPWGAD

SEQ ID NO: 103 - protein, 220 aa, synthetic construct
  REGION 1..220: note = pYY-BEM3.36; tr|A0A2R2X2J8|A0A2R2X2J8_PTEVA polypeptide sequence
MPRIGNMNLLSEKTFNYHFGNQLRVKKPQGRRRTYLCYKLKLPNETLVKGYFINKKKNHAEIRFINKIRSLNLDQTQSYKITCYITWSPCSYCAGKLVALVKSCPHLSLQIFTSRLYYHWLWKNQAGLRYLWKINISVLVMKEPEFADCWDNFVNHQSRRFKPWEKLTQYSNSTERRLLRILRINRTDLFLAQSSEQDPGLNDLVDAIKRLFLDAHRPRD

SEQ ID NO: 104 - protein, 198 aa, synthetic construct
  REGION 1..198: note = pYY-BEM3.37; tr|A0A151P6M4|A0A151P6M4_ALLMI polypeptide sequence
MAVEEEKGLLGTSQGWKIELKDFQENYMPSTWPKVTHLLYEIRWGKGSKVWRNWCSNTLTQHAEVNCLENAFGKLQFNPPVPCHITWFLSWSPCCQCCRRILQFLRAHSHITLVIKAAQLFKHMDERNRQGLRDLVQSGVHVQVMDLPDYRYCWRTFVSHPHEGEGDFWPWFFPLWITFYTLELQHILLQQHALSYNL

SEQ ID NO: 105 - protein, 158 aa, synthetic construct
  REGION 1..158: note = pYY-BEM3.38; tr|A0A2K6MNR2|A0A2K6MNR2_RHIBE polypeptide sequence
IWLCFTMEIIKQCSTVSWKRGVFRNQVDPETHCHAERCFLSWFWEDTLSPNTNYQVTWYTSWSPCLDCAGEVAEFLARHSNVKLAIFAARLYYFWDTDYQQGLRSLSEEGTSVEIMGYEDFKYCWENFVYNGDEPFKPWKGLKYNFLFLDSKLQEILE

SEQ ID NO: 106 - protein, 182 aa, synthetic construct
  REGION 1..182: note = pYY-BEM3.40; tr|F1CGT0|F1CGT0_ANOCA polypeptide sequence
KAAILLSNLFFRWQMEPEAFQRNFDPREFPECTLLLYEIHWDNNTSRNWCTNKPGLHAEENFLQIFNEKIDIKQDTPCSITWFLSWSPCYPCSQAIIKFLEAHPNVSLEIKAARLYMHQIDCNKEGLRNLGRNRVSIMNLPDYRHCWTTFVVPRGANEDYWPQDFLPAITNYSRELDSILQD

SEQ ID NO: 107 - protein, 230 aa, synthetic construct
  REGION 1..230: note = pYY-BEM3.41; tr|C7AGG3|C7AGG3_HORSE polypeptide sequence
MDPQAPTQRGGLGQAYQGGDYVQAPGNGNTQHLLSEDVFKKQFGNQRRVTKPYYRRKTYVCYQLKLLRGPTIAKGYFRNKKKRHAEIRFIDKINSLGLDQDQSYEITCYVTWSPCATCACKLIKFTRKFPNLSLRIFVSRLYYHWFRQNQQGLRQLWASSIPVVVMGYQEFADCWENFADNRGNPFQSWEKLTEYSKGIKRRLQKILEPLNLNGLEDAMGNLKLGSVDLG

SEQ ID NO: 108 - protein, 197 aa, synthetic construct
  REGION 1..197: note = pYY-BEM3.42; tr|A0A250YMK7|A0A250YMK7_CASCN polypeptide sequence
MSLLKEDIFLYQFNNQQQVQKPYFRRRTYLCYQLEQPNGSRPQWPAKGCLQNKKGHHAEIRFIKRIHSMGLEQDQDYQITCYITWSPCLACACALAELKNHFPRLTLRIFASRLYFHWIRKFQMGLQHLYKSGVLVAVMSLPEFTDCWEKFVNHRQVFFTPWDKLEEHSRSIQRRLRRILQSWDVDDLTDDFRNLRL

SEQ ID NO: 109 - protein, 189 aa, synthetic construct
  REGION 1..189: note = pYY-BEM3.43; tr|B7T160|B7T160_SHEEP polypeptide sequence
MPWISDHVARLDPETFYFQFHNLLYAYGRNCSYICYRVKTWKHRSPVSFDWGVFHNQVYAGTHCHSERRFLSWFCAKKLRPDECYHITWFMSWSPCMKCAELVAGFLGMYQNVTLSIFTARLYYFQKPQYRKGLLRLSDQGACVDIMSYQEFKYCWKKFVYSQRRPFRPWKKLKRNYQLLAAELEDILG

SEQ ID NO: 110 - protein, 541 aa, synthetic construct
  REGION 1..541: note = pYY-BEM4.1; tr|A0A182D0J1|A0A182D0J1_BLAVI polypeptide sequence
MTNPESPPQAPCDFNEDALLNREPLRGSPIKFVSPVDYPDLVFALAGPVGVDIDYIQQSISDCLKSFDYSTEFIRITEIMQDIKCSKTIDCTDMLKEYQSKIEYANELRRAYRAKDLLAALTISAISKLREQIKERDEATNKSNIQPSRRKLAWVVRQLKTPEEVRLLRAVYGKQFVLVSIYSSPQRREDFLISKIKIKSRGTIDNNTSSEGAQRLIERDSKEDNEYGQNLSGTFCLGDIFVDSNNKESAIVSIDRFLNAFFGSNEISPTRDEYGMYLAKTASLRSCDLSRQVGAAIFSKTGEIISLGSNEVPKAGGGTYWTGDNADSRDIRLGHDPNEINKVEIFAEIISRLLEDKLLSNDLLNKDAASIVTILLSKNEGKRYKDLRVMDIIEFGRIIHAEMSAICDAARNGRAIIGATLFCTTFPCHLCAKHIVASGIGRIVYLEPYPKSYAKKLHSDSIQVEDHSDSEKVSFEPFIGISPSRYRELFEGGRRKDPFGEALKWKNDPRKPVIDVVVPPHFEAEKLVIAQLGKLIVSGTG

SEQ ID NO: 111 - protein, 330 aa, synthetic construct
  REGION 1..330: note = pYY-BEM4.2; tr|A0A2D6EXD2|A0A2D6EXD2_9ARCH polypeptide sequence
MIIGLVGTIGAGKQTIIDYLQEKYGYNALSCSDVLREILKKQGKPVTRDNLREIGNKTREEGGNGAIAKILLEKLRNNWKANYIVDSLRHPDEVSVLRTSPLFHLVAVDADLRIRFERVKARKREEEPTTLPAFVERDQKEMFGTGNEQRIRETMELADELVLNNGTVEELKQRIDDLNLVSDERLRPSWDDYFMRLARLAAQRSNCMSRKVGAIITKDRRVIATGYNGTPRGVKNCNEGGCERCNSAVAKGTAISECLCLHGEENAIIEAGRVRSEGATIYTSFLPCLWCTKMIIQAGLKEVVFSEVYDLHEASIKLFETSGVLIRRLK

SEQ ID NO: 112 - protein, 367 aa, synthetic construct
  REGION 1..367: note = pYY-BEM4.3; tr|F7YVM7|F7YVM7_9THEM polypeptide sequence
MNEFKYMSLALKLAKKGKYTTSPNPMVGAVIVKDGKILATGYHKKAGQPHAEINALSKLNFQAQNCEMYVTLEPCSHYGRTPPCADAIIRSGIRKVVIATLDPNPLVNGKGVEKLKNAGIEVVCGVLEEKAKKLNEKFFKYITTKIPFVALKIAQTLDGKIALKNGESKWITSEKSREYVHKLRMEYDAVLTGIGTILKDDPQLNVRLKKVYKQPLRIILDSKLKIPLSAKVLEDPSKVIILTTALADKEKLEELRSKGVEVIITNEKNGIVDLESALKILGEKKITSVMVEAGPTLLTSFLKESLFDKIYLFIAPKIFGADSKSVFSELGLEDISKSQKFSLESVKKIGEDLLLELYPKQLKKLEE

SEQ ID NO: 113 - protein, 449 aa, synthetic construct
  REGION 1..449: note = pYY-BEM4.4; tr|A0A3M6UNF1|A0A3M6UNF1_9CNID polypeptide sequence
MEEKSELENELMRSTSPKPSVPNGSKGNECEQRETRITKENLYMVLALWMEEFPVVEQTSSAKRLNKVGVVFVLPTDRVLAADCSRDGVHGVARVMVNHCGKLEGCKVFVSRKPCSLCAKLLVQSKVSRVFYLPIEPESENKGEIARADNLFKNSSVGQSVFVPCVEQKVLDKLEDKLPKEIITPDDISECRDNLLKKCGWSAEWFARAQASLPWPCFEGKMKSQVDNDFKSLIKWIAVVKAPMDKGVAFPKVKLTSDSRVVPDCDADNFPDSKTAYHMMIFAKMLARQTDDPKTGVGAVIVRGKVPDIVSLGWNGFPSKALYGEFPRASDDDRALQKKFPYVIHAEQNALMVRNVKDLTDGILFVTKPPCDECAPMIKLSGVKTIVIGEKIEKSRGGELSYNLIKEYIKEGIMTCYQMEATKTKAKRLASDPETRKRLKSSCSNSNDV

SEQ ID NO: 114 - protein, 414 aa, synthetic construct
  REGION 1..414: note = pYY-BEM4.5; tr|A0A2G3K826|A0A2G3K826_9BURK polypeptide sequence
MTKIIDDVNTAAAAVLDQATAAANQTTFAVGGVMVNNQTGEVISAIHNNVIIPLSNNVSFTFDPTAHGERQLVYWYYANKEALKLPEPNQITVITSLDPCAMCTGALLTAGFNVGVVAIDTYAGINCAQNFQFATLPANLRTKAQKNFGYYASGAANFKPLTRSYVGGPSVAFKNGVVTPANLRDCGTVFTQSVDTVRNTSNSTGLAPSQMSNPAELPSNSAILQAYRAIYKKAFTIKIDNPRLPDAQILTELKAVLADAPNARNAVAFIDPFGNLVLCMADAFNTSPVHAAFMNVTQEYAKTRWDLMNKYAQASTTDNPALYLTHPKYGTFVYLYAPDPDDSITIMSLGAYGSTMEGPIPNMFPSNLQFYYPPRNGAQFSELVPVVNELPPFYTQNVNISLMQVPGVTQAPTK

SEQ ID NO: 115 - protein, 308 aa, synthetic construct
  REGION 1..308: note = pYY-BEM4.6; tr|K1ZCJ4|K1ZCJ4_9BACT polypeptide sequence
MSSRAKKNRSTNLKKSIGQKSIENKPTDQKKDQVLVAYVPVIHEGYRRFFRHFPAVKELWLISQELSHELRSLQKDIRALKASETKKLLQTWGQFQKIKLLTPSSLAILQKTTTQLVFPDEEISHHLVEKYFAQNRVLFASFFLRWDKKSSLKKHDLQEYSEISNKEFDQMMIAIAQQEADKSDDWWRQVGGLIFKDETILLLAHNQHTPTEAEAYFAGDPRADFHQGEYLKISTAIHAEAYLIAQAAKQGISLEGADLYVTTFPCPVCAKQVAYSGIKRVFFREGYSLLDGETILKANGVKLIRVTV

SEQ ID NO: 116 - protein, 615 aa, synthetic construct
  REGION 1..615: note = pYY-BEM4.7; tr|A0A1G3PNQ8|A0A1G3PNQ8_9SPIR polypeptide sequence
MRDLPLLVLGLTGPMGAGCTRFARDISKMEPGKVIKKQGLLDQVAHEISELSKKASEIRLQCISNGKNSELAELKRLNRRLNAKLAERACLHVIAKSSLPEPLFISLNTIVIKIAVDSITAPEFAEWAKNHAKVADLLKWLRTQWESELTLYETWGQDAGRFSQDELEKMDAMFAEFERIGDEILKEDFETYFGKRNNDFSIRMFSENIRLSGNPFRPAENGGGGGKYDEPSMVMIARETDRYIRFYRTRSDQKRSHFFIIDEIKNPREAEYFRARHQNFFLVSIFSSSEIRASRMRRGLGHDAGVSDADFQHLFRELDSRDWGADDFDAHGLHRQNIYRCFNLADIAINNDVEDERFSEVLFNKFIRYYALMLSPGCVQPTPQETYMHLAYSLSLRSTCISRQVGAVITDLEDRILSLGWNEVPEGQIGCGLKVKKDYTDKENPLFEMEIWDNVITAEDLAVWDDEDSICVKDILSRIEIKTKLKSVSLTPEERADVLKALRIKRLEYSRSLHAEENAILQVASRGGVGLKDGTIYVTTFPCELCSKKIYQVGISKIYYTEPYPNSISEKVILKDGIRNIKILQFEGVKSYSYFKLFKPGFDKKDAQMLEGRGI

SEQ ID NO: 117 - protein, 291 aa, synthetic construct
  REGION 1..291: note = pYY-BEM4.8; tr|A0A1G0PGF4|A0A1G0PGF4_9BACT polypeptide sequence
MKHNNQLRKEIEKLLGQNSIIKNDELKKLQKEYKIETDELLISFLPYAAEFAKVPISKYKVGAVVLGKSGNIYFGSNMEFEAGALSATVHAEQSAVNNAWLNGETGINKIAVTAAPCGYCRQFLNELTTAKQLHVLLKDKNLEAAKVFKLTELLPEAFGPRDLEIEGGLMKVENHKLKIENINDELINAALEAANKSYAPYSKNYSGVSIQLSDGTIFSGRYSENAAYNPSLLPFQSALAFMNMNTKKGSNNKIVDAVLVEAVSNISQKDAAGTLLNSISKTKLRYYKIKN

SEQ ID NO: 118 - protein, 398 aa, synthetic construct
  REGION 1..398: note = pYY-BEM4.9; tr|A0A0P4WGY5|A0A0P4WGY5_9EUCA polypeptide sequence
MEENSSATSQPKCASRTKQGGNDLSTDMSNLSVGETKRTDFLPWDDYFMAVAFLSAMRSKDPSSQVGACIVNADKKIVGIGYNGMPIGCSDDELPWNKESLDPLQTKYMYVCHAEMNAIMNKNSSDLAGCCVYVALFPCNECAKLVIQAGIREVVFFSDKHQQKPETVASKKMLNMAGVAYRQYTPSQSKIELNLSLKEQEKSEPTADITQSSERDQNSKRKDYLSWEEYFMAMAHLSALRSKDPITQVGACIVNSKKKIVGIGYNGMPLGCNDDLMPWGNSSSNKLETKYMYVCHAGVNAIMNKNSCDVSGCTLYVALFPCNECAKVIIQAGIKTIIYASDTNKDQASILASKKMLDMAGIKYRADNLSQRKIVIDFKTIDWNSRFMNDHQNDPTCL

SEQ ID NO: 119 - protein, 259 aa, synthetic construct
  REGION 1..259: note = pYY-BEM4.10; tr|A0A3D8IG27|A0A3D8IG27_9HELI polypeptide sequence
MRKNILYFILTLFFLSGLYATSLPEDNVVSGVIYEKIDTVSAEVDHIYPMLALAIVYKDWQEKNMLNKQGHNIGLVIVDENNMPVFWVRNSVHATHNGTQHGEVRLVSNLLNCEGFNKYLDKYTLYTTLEPCIMCAGMLSMVQIPKVVYAQKDLSCGNTQEIISTAKYPRYYKAFTVENGYKKDLEECFEQYKICKNDSITDFLVNDSAKEIFRKASNDLQDYKVKFKENRRVIKVAQEFLQNIQTKDNLDVLQCPKNM

SEQ ID NO: 120 - protein, 256 aa, synthetic construct
  REGION 1..256: note = pYY-BEM4.11; tr|A0A351C8C4|A0A351C8C4_9BACT polypeptide sequence
MNELTKQSEHLRNEALRIATRSYVPYTGQQEGVIILLENGDLIPGVRVENASFQLTIPALQNALSTMYALQRTDISMIVSSIPFTDSDLAYTGGMAEIAWEMVGASLLLVAGAHIPEAGTFIDPARGENLLDVSREAALNAFIPESDFPVGSAIQTSDDVVIDGCNVEHSDWSKIICAERNVLSTARSYGLGQITTIYVSCPKEPGGTPCGACRQVIVELAPDATVWMDRGNQEPIAMKATKLLPGHFTGNVLKKQ

SEQ ID NO: 121 - protein, 301 aa, synthetic construct
  REGION 1..301: note = pYY-BEM4.12; tr|A0A1G6V2K7|A0A1G6V2K7_PEPNI polypeptide sequence
MPIVRVNEIGARLPEDWEALETAIWQAYVSREDLPDAGELDLTLVDDATIQELNKTHRQLDKSTDVLSFPMYDDRDDLAADVQAGLPVILGDIMISVPTAERQAQAYGHSFKREMAYLLVHGLLHIAGYDHMSAEEKSAMRRAEEAILADVDVPRDTAPSKTAAVLDEADVQALIDAARAARLQAYAPYSGYAVGAALLAADGRRFCGVNVENASYGATCCAERTALFAAVTAGARDFIALALVTEGDEPAPPCGLCRQALAEFSPDLAIYLAGPTGETYRRTSLAALFPEAFSLSTKESV

SEQ ID NO: 122 - protein, 528 aa, synthetic construct
  REGION 1..528: note = pYY-BEM4.13; tr|F2NP91|F2NP91_MARHT polypeptide sequence
MPVMETHALEARFKEALARLCPEGRLLAAVSGGGDSVALLYLLKAAGRDTIVAHLDHALRPDSAADAAFVEKLAQRLGFPLETEHVDVRALAHRKRINLEAAAREVRYAFLARVARRWKARCILTAHTLDDNAETVLLQILRGAGRGLGIRPLQRRVARPLLEFSRAELRAYLEARGARWLEDPTNRSLELDRNYLRHAVLPRITARFPHALEALARFSQAQQADDWALEALSARHLIPDRRWPVPAYRALPLERAPEALRRRAIRGVLEALGVRPEARLVADVEAALGGRAQTLPGGVVVRRQRGTLFFIPPTVRFPKVQPPAGLEARPPRPGDYLVFPYGRKRLVDFLNERGVPRELKRRWPVGAVGAEVRWVYGLWPEPDEDRYMRRALVLARAAARQGEVPIGAVLVRDGAVLAEAANAVEASRDATAHAELLALRTALRRVGEKVLPGATLYVTLEPCPMCYGAILEARVARVVYGVENLKAGAFTVHGLEPRVALEAGRVEGECAKVLKDFFARLRPGRDGA

SEQ ID NO: 123 - protein, 226 aa, synthetic construct
  REGION 1..226: note = pYY-BEM4.14; tr|A0A316TX77|A0A316TX77_9BACT polypeptide sequence
MINGYTPYSGNQNTCYVKGESGTFYPGVRIENVSYPLTISSVQAAVCSCLANSDNPVEYYTGDHQPELLQVWADEYDMKPGGKLPDSPLKLFDPLVPSIPDIKKELDVLTEKSVTPNSGFPVSALLQTEKGYIRGVNIELSSWALGLCAERVAISRALTAGYTQFKSIHIYAPEADFVSPCGACRQVLLEVMPDADTELYHGDGTLSKHIVSDLLPFGFTSHKLKK

SEQ ID NO: 124 - protein, 321 aa, synthetic construct
  REGION 1..321: note = pYY-BEM4.15; tr|R6VYG3|R6VYG3_9FIRM polypeptide sequence
MIHKGTQTIETKRLILRAFTPDDAEAAFENWMSDPKVTEFLRWKTHADISDSRKIVNEWANGSADPEFYQWAIVPKDVNEPIGTISVVDRNDALGIFHIGYCIGSKWWHKGITSEAFSAVIHFLFEEVGANRIESQHDPENIHSGDVMKKCGLTFEGTLRQADFNNRGIVDACVYSILQSEWQNNTSVWQRLYNAALTVQNDRVVSPFIDAGGVAAALMTKKGNIYTGICIDTASTLGMCAERNAVANMLTNGESRIDKIVAVMPDGKVGAPCGACREYMMQLDRDSGDIEILLDLETEKTVRLKDLIPDWWGAERFGDTE

SEQ ID NO: 125 - protein, 229 aa, synthetic construct
  REGION 1..229: note = pYY-BEM4.16; tr|A0A3C1HZ18|A0A3C1HZ18_9BACI polypeptide sequence
MGDIMENWNELSEPWKRCFLQAWKAYCHGSIPIGAVLVDSEGEIFLEGRNRVHELTAPEGQLCDCRIAHAEMNVLVQVKTSDYEKLSGATIYSTMEPCIQCFGAIILSRIKNISFAAIDDKLAGATTLEDRHGFIKSRNLNIAGPFSHLGEIQIILRTDFLLRIFDSEYADPLIAAHEKDYPIGVALGRHYHRNNRLQVAKKETIPFGELFNEFSFDIKRAREGYTLGK

SEQ ID NO: 126 - protein, 205 aa, synthetic construct
  REGION 1..205: note = pYY-BEM4.17; tr|A0A1M6KV24|A0A1M6KV24_9BACT polypeptide sequence
MEASQQNILLKIEGKGPVAEINFTVTLPEWLVEQVQSGSTVFLTQKEKMRFVLELARKNVAQETGGPFAAAVFSLESGELVSAGVNVVVESRCSSAHAEVVALSLAQKAVDSHDLGAAGLPRMVLVSSAEPCAMCMGAIPWSGVKQVICGARDEDVRSVGFDEGAKPLEWVEDFAERGIEVIRDVLREEATEVLWDYRERGGEIY

SEQ ID NO: 127 - protein, 207 aa, synthetic construct
  REGION 1..207: note = pYY-BEM4.18; tr|A0A2U0T9B4|A0A2U0T9B4_9RHIZ polypeptide sequence
METAELISRLLDVIEKDIAPVTAKGVARGNKLFGAAILKKSDLAVIVAETNNEIENPLWHGEMQAIKRFFELPADQRPATRDCLFLATHEPCSLCLSGITWSGFDNFYYLFSHQDSRDGFAIPYDIQILKSVYAVPEPETGTVSPARDLYNRSNDFWTSHGLQDMIAGLARSNREALLARIDDLNALYAELSERYQRDKGGKGIPLP

SEQ ID NO: 128 - protein, 231 aa, synthetic construct
  REGION 1..231: note = pYY-BEM4.19; tr|A0A2K9PN08|A0A2K9PN08_9FLAO polypeptide sequence
MSDKKESKIKISKTSESIELDEIHSLLSYSIVQKFWENDDRNGRGYNVGVILVDENKNIVDWDINSVNKTENSTQHGEMRLISRYLDKDELYSLKGYTMYPTLEPCAMCAGMMTMTNVYRTVNGQMDYFYSKALERLSIDTRECGGYPPYPRTVISEISPSSISTRLDAEYKQYTNAGNKPIITKFLSTYKAKTIYDDAFNQFINFKCKFPENKTKYENAIKFYNSLPESI

SEQ ID NO: 129 - protein, 330 aa, synthetic construct
  REGION 1..330: note = pYY-BEM4.20; tr|F4PWM7|F4PWM7_CAVFA polypeptide sequence
MRFSLSLLFVILSVLLAGVLACKDPYNPETVDYGQCASATKANYEVRSDSKVLTPADLPADELAVHESRMRHIIDIARVNNKKFVSSIYFPNGTLACIGINTGKPNMIAHGEIVAIQNCTEIHGISMYTNYSIYTTGEPCSMCASAILWSRFKTVVWSTYNSDLYCKICMSNIPIDSSYIFSRAYGLGIEAPVAIGGVVKAEGDAWFGTYCNRPTSIYYIAPKCACQDPAKVSPLKFTQTRTTVWVEGGDKVVTQWNAIISNPSNSTIVDPPIVISPSVVFKGAPWGISAASEPNTYKLSYNKVLFPGQTFSFGYSVYGLEEVAFTALEA

SEQ ID NO: 130 - protein, 193 aa, synthetic construct
  REGION 1..193: note = pYY-BEM4.21; tr|U7QZM1|U7QZM1_PHOTE polypeptide sequence
MNKTRRKLLATLGIMSISMSFIAQAGEKKTQVINNILSKQEITEHEKYMREAIKEAIKNPKHPFGAVIVNRNNGEILSRGVNTGRNNPILHGEIQAINHYITQYGNQGWENVALYTTGEPCSMCMSALVWIGIREVIWATSISVIRNSGIRQIDISAHEIAERASSFYNPITLVGGILANETDKLFLERKRGN

SEQ ID NO: 131 - protein, 319 aa, synthetic construct
  REGION 1..319: note = pYY-BEM4.22; tr|A0A081CH48|A0A081CH48_PSEA2 polypeptide sequence
MASRRHLLATQVTGNHRKLSLWHLRGWLSPYTKLVDAVYFLTTNSFYHSLQTPPVQSITMLLSSIITSLALAAQASAYREGLHPEFQSGLSINSVPATDRDHWMRLANSAIYYPPVSHPCPQAPFGTAIVNTTSNELICAIANRVGSTGDPTQHGEITAIQHCTNVMRKKGLSPQEIIAAWKQLSLYTNAEPCTMCLSAIRWAGFKEVIYGTSVGTISENGRNQIYIPSNLVLEKSYSFGHATLMLGNILTHETDPFFQHQFNESAPCPVGCERTQVGEARVKTCEPVPNWQKLVRLEYSEDSRVGSEPVAHTPLHLEL

SEQ ID NO: 132 - protein, 203 aa, synthetic construct
  REGION 1..203: note = pYY-BEM4.23; tr|A0A3D3HMU1|A0A3D3HMU1_9GAMM polypeptide sequence
MDYSDAILGAITSIRRNSKQPGVNVTDNVTDSSTQYNNDEYWMRRALALAREAGEAGEIPVGAVLVKDNQQVAGGFNQPIRSHDPAAHAEILTLREAGAVLGNYRLIDTTLYVTLEPCMMCAGALVHSRIKRLVFGAAEPKTGAAGSFIDLLTLPRLNHYMEVTGGVLGEECSVLLSDFFRRRRAEKKALKRQNSESGSDSAS

SEQ ID NO: 133 - protein, 270 aa, synthetic construct
  REGION 1..270: note = pYY-BEM4.24; tr|A0A1N5WT13|A0A1N5WT13_9ACTN polypeptide sequence
MLEKIERRLVAAAEAVVRSPSTGDAHTVAAAAMDANGDIYSGVNVFHFTGGPCAELVVIGSAAAANAPPLITIVAVGDGDRGVIAPCGRCRQVMLDLHPDVFVIVPTGDGQLAAKPVRELLPFGYVARTGSTAPRVVYFHPRHYDTISSGLKTATVRFQDSVQTGPAVFVFDDGESIRRLDAVVEKVESRRLDHLTEEDAHHEALPDSDALRDAIKTQYPMLGDGDVVDVATFRLTAISAPDPDPRSSYPPAVSRCNPAGPRADLLVGQS

SEQ ID NO: 134 - protein, 257 aa, synthetic construct
  REGION 1..257: note = pYY-BEM4.25; tr|X0SAC5|X0SAC5_9ZZZZ polypeptide sequence
MTKDGRVIASAHDTEVTDQDSTAHAEINAIRKASKIYRKDLTGCLIISTHEPCPMCTGSIIWSNISKVVYGVSIRDSIKAGRDMINLSCKEIIKKPNAEINIYDGILKKECLKLYNNDTRKLVKKFRKYEWINIEENLLNKRMQWFENNKTMIRKLKGNDLEKAYHLILMKIGIKRSEAPIVKKSESKIIFHSKNYCPSLEACIILDLDTREVCKEIYERPTEELIRRLNSKLRFTRNYDCIRPYSDYCEEIIILEK

SEQ ID NO: 135 - protein, 154 aa, synthetic construct
  REGION 1..154: note = pYY-BEM4.26; tr|A0A3B8IC10|A0A3B8IC10_9BACT polypeptide sequence
MPSHEDFIHQCLELGKEALLQGNPPVGSVIVWQDQVIGRGIENGRSSGDITQHAELLALQEAVATGQRDKLKEAIIYSTHEPCVMCAYPIRQYKIPTVVYSVAVPELGGHTSSWHLLTTEDVPKWGKAPKIITGISAEEVEALNAAFQDSLKKG

SEQ ID NO: 136 - protein, 180 aa, synthetic construct
  REGION 1..180: note = pYY-BEM4.27; tr|A0A2N9P8B9|A0A2N9P8B9_9FLAO polypeptide sequence
MFIFKLISPPVSIEVYQDKIIQKLYICFMENIFTDEYFMKKALQEAETAFQQGEIPVGAVIVIDNRIIARSHNLTEMLNDVTAHAEMQAITASANFLGGKYLKDCTLYVTLEPCQMCAGALYWSQISKIVYGATDEQRGYRAMGAQLHPKTKVISGIMQNECTHLMKDFFKQRRSKSTKD

SEQ ID NO: 137 - protein, 178 aa, synthetic construct
  REGION 1..178: note = pYY-BEM4.28; tr|K1KX30|K1KX30_9BACT polypeptide sequence
MVKNPVNNNELYFGKHSEIPMNEEQKAYMKMAVDLSRSGMESGKGGPFGCVIVKDGKVIGIGSNSVLETNDPTAHAEIVAIRDACRNLGHFQLDGCEVYTSCEPCPMCLGAIYWARPSKVFFANDKRDAAEAGFDDDFIYQELELPYEKRKIPFEQGMQDTAKEVFQEWILKEDKTLY

SEQ ID NO: 138 - protein, 196 aa, synthetic construct
  REGION 1..196: note = pYY-BEM4.29; tr|R4XI84|R4XI84_TAPDE polypeptide sequence
MSSEIEPPSTDVHKHAVAEAADESGAADAFMQIALQQAETALLNKEVPVGCVFVHQPTGTVLATGANQTNASLNGTLHAEFVAIESILRDHPPSIFRESDLYVTVEPCVMCASALRQLQVRKVYFGCGNDRFGGCGSVFSIHSDASKTGDAAYMVESGIFRKEAIMLLRRFYLLQNESAPKPALKSTRVLKEHFDE

SEQ ID NO: 139 - protein, 212 aa, synthetic construct
  REGION 1..212: note = pYY-BEM4.30; tr|A0A239CVF7|A0A239CVF7_9DELT polypeptide sequence
MSPASKKHFPSLFSFLLLTIGLICGTAHAQPQGHTADDTAATLANASLKEHEPFIRRCYQLAIDAGKKGNHPFGALLVHKGKIVLEAENTVLTDNDFTNHAEMNLIAEAARTLSRQIIPEATVYTSCAPCAMCTATLAMAGFTRIVYGVSHDALNKRFGLKGKSVSCPALFKTMGMELEFVGPVLEKEGLRVFDFWPEKDPHAQMLKKQARK

SEQ ID NO: 140 - protein, 320 aa, synthetic construct
  REGION 1..320: note = pYY-BEM4.31; tr|A0A1Q3NME1|A0A1Q3NME1_9BACT polypeptide sequence
MTEFNYDWAKLAFSSKRPLTNLKATFIIAPREISEKRFTQLLKEYLPKGDILLGISKEDYVEGLEGQPQFAMLQQKTLQKLIDKVNDASAHKVYTLRYFQRELPAIIEKLTPPRVVGIHGSWHHSFHTLPIYYLLSEKRIPYQLVAAFSDEDEARAYEVATDKKIVRPTLEGSFDDTTVLQLTDEVAKSSYDYGFQTGAILAEKVNGVYQPVAAGFNKVVPYQTYALLNGASRETNFSPANDMNHYDTIHAEMQILVEAAKQGISLKDKTLFVNLMPCPSCARTLSQTELSEIVYRIDHSGGYAVDLLTKVGKDIRRIVY

SEQ ID NO: 141 - protein, 180 aa, synthetic construct
  REGION 1..180: note = pYY-BEM4.32; tr|A0A2G6N4N7|A0A2G6N4N7_9DELT polypeptide sequence
MKERTVSYSDRHFMAEALEMAESALTQGEFPVGCVIADGTAVVARGHRTGTTAGAVNEIDHAEINALRHLGLAGEHLDRTDLTIYSTMEPCLMCFAAIVLSGINRIVYAYEDVMGGGTGCDLTGLPPLYRDAPLTLVAGVRRRASLNLFRRFFTDPENGYWAGSLLSRYTLNQTKDSHRL

SEQ ID NO: 142 - protein, 156 aa, synthetic construct
  REGION 1..156: note = pYY-BEM4.33; tr|A0A0G0RBB8|A0A0G0RBB8_9BACT polypeptide sequence
MQSVQYNKLTHLQRRALDEAEQVLENSYNPYSHFYVGACLISEDEQLIAGTNFENAAYGSAICAERAAVLRANAMSIRRFRGIAIIARGEDFNTTEVTGPCGSCRQVLYEISQVSGCDLQVILATSKKDKIVITTIRELLPLAFGPLDLGVDIGKY

SEQ ID NO: 143 - protein, 217 aa, synthetic construct
  REGION 1..217: note = pYY-BEM4.34; tr|A0A327L2Q5|A0A327L2Q5_9RHIZ polypeptide sequence
MVTSRDGEDEAMMARCVALSRIAVGKGEYPFGAVVAREGRIVAEAINRTIRDGDVSRHAEVIALARAQKAIGRRELRECSLYSNVEPCAMCSYCIREAWVGRVVYALGSPVMGGVSKWNILRDDGLSGRMPQVFDAAPEVVSGVLVEQAQAAWRDWSPLAWEMITLRGLMTDPSARPECRTRAARPRSLWHHLVALIERPPRPYVDPTSAAEGHADL

SEQ ID NO: 144 - protein, 162 aa, synthetic construct
  REGION 1..162: note = pYY-BEM4.35; tr|S2DR30|S2DR30_9BACT polypeptide sequence
MKMKKKIEITVSLEVIQKSEWSKEDRSLIERAIHAVEHAHAPYSNFMVGTALLLDNGQIFSANNQENVSFPVGICAERAVLSYAMGNFPNNRPVKLAVVAKRRSDSTWATVTPCGLCRQTINEYEVKFGHPIEILMLNPGEEILKASGIDQLLPFRFNDLNS

SEQ ID NO: 145 - protein, 153 aa, synthetic construct
  REGION 1..153: note = pYY-BEM4.36; tr|A0A369QGF1|A0A369QGF1_9BACT polypeptide sequence
MEEHEKWMHWCLNLAQQALQQGDFPVGAVVVQKGKLIGQGVEAGQLKKDITCHAEMEAIRDARQTINTADLQNCILYSTHEPCIMCSYVIRHHKISRVVVGTTVPEVGGSSSAYPLLSAPDISIWVAPPHLVTGVLAEACQALSQAYKQKFKK

SEQ ID NO: 146 - protein, 159 aa, synthetic construct
  REGION 1..159: note = pYY-BEM4.37; tr|A0A1W6X4U4|A0A1W6X4U4_9RHIZ polypeptide sequence
MTNPSRQERWDRRFLELAKVFGTWSKDRSAGTGCVIVGPDRLLRASGYNGFARGIDDEVPERHERPAKYSWTEHAERNAIYNAAKLGISLDGCTAYVNWFPCIDCARAIVQAGIVRLVGLHPDHADQRWGSEFKFATEMLRESGIEIILYDIPELAARK

SEQ ID NO: 147 - protein, 490 aa, synthetic construct
  REGION 1..490: note = pYY-BEM4.38; tr|A0A238BW09|A0A238BW09_9BILA polypeptide sequence
MEEMARKIRTKAKKANSYCNTMTFLISKASIVLLKAECKRIELTVVIFRFLIKMNASEPNNELCDMTVIKSMLKITHVIFDLDGLLIDTEVVFSKVNQCLLSKYNKKFTPHLRGLVTGMPKKAAVTYILEHEKLSAKVDVDEYCKKYDEMAEEMLPKCSLMPGVMKLVRHLKTHSIPMAICTGATKKEFEIKTRYHKELLDLISLRVLSGDDPAVKRGKPAPDPFLVTMDRFKQKPEKAENVLVFEDAANGVCAAIAAGMNVIMVPDLTYMKIPEGLQNKINSFSDNLIISNDLNVALMSLKKELSEEEVHFLNRAFEIAVDAVLNNEVPVGCVFVFEGQEVAFGRNDVNRTKNPTYHAEMVALKMMKQWCMDNGRDLEEIMRRTTLYVTLEPCIMCASALYHLRLKKILYGAANERFGGLVSVGTREKYGAKHFIEIMPNLSVDRAVKLLKEFYEKQNPFCPEEKRKVKKPKKSGNNNDNSDDAVALNV

SEQ ID NO: 148 - protein, 159 aa, synthetic construct
  REGION 1..159: note = pYY-BEM4.39; tr|A0A1J5H6Z0|A0A1J5H6Z0_9BACT polypeptide sequence
MAYQPSEKFMQMAIDKTREGVLSGQTPFGACIVKDGKVVACEHNTVWQDTDITSHGEVHTIRAACKAIGSIDLSGCILYSTCEPCPMCFSAIHWARIDTVVYGAFIADAQDAGFNELTISNEKMKEFGGSPVNFISGFMRDENVALFKLWKEQGANNVY

SEQ ID NO: 149 - protein, 168 aa, synthetic construct
  REGION 1..168: note = pYY-BEM4.40; tr|A0A3C2D945|A0A3C2D945_9BACT polypeptide sequence
MKTTEIRIIVHEYQNIDELTENDQYLLHEARRITEFAYAPYSGFHVGAAILLGNGMIVKGNNQENSAYPSGLCAERVALFYANANYPDSEVKTIAISAAKNGILVNDPIKPCGGCRQTLSEAEVRFGSPIRIILDGQDSILVLHGVESLLPLSFSKKDLASPLAATGR

SEQ ID NO: 150 - protein, 214 aa, synthetic construct
  REGION 1..214: note = pYY-BEM4.41; tr|A0A1I7EYS3|A0A1I7EYS3_9BURK polypeptide sequence
MKFKLDPSRPPDEDDYYLGVALAVRRKANCTGNRVAAVIVKNKRVIATGYNGVPEDMPNCLDGGCLRCSNPGGQFKSGTRYDLCICVHAEQNALLTAARFGISVEGAHLYTTMQPCFGCAKEILQAKIEKVFYLHPWVPTDVDPVMDAAMKAEYAKIIGKLKVKKLDFDDPVATWAVTTMRQAALASDKNPDKKTPPKTAKKKVAKKKSRTSPR

SEQ ID NO: 151 - protein, 155 aa, synthetic construct
  REGION 1..155: note = pYY-BEM4.42; tr|H8GQX8|H8GQX8_METAL polypeptide sequence
MNHEHFMRRAIELARQAPQYPFGAVIVRRDDGQCVGQGFNRSDLNPTYHGEMVAINDCAVRHCAEDWRGFDLYTTAEPCAMCQGAIEWAGIGRVFYGTSIPYLQKLGWWQIDLRAAEVSARAVFRDTLIVGGILETECNALFAAARRGCFGTGSE

SEQ ID NO: 152 - protein, 156 aa, synthetic construct
  REGION 1..156: note = pYY-BEM4.43; tr|A0A0S8HZN3|A0A0S8HZN3_9CHLR polypeptide sequence
MDEHDIRFLRASFDVARNARKNGNHPFGALLVDEHGRIVMEAENTVITAKDCTGHAETNLMREASSKYDSDFLANCTIYTSTEPCPMCAGAIFWSNVRRVVYGLSEESLYEIAGRGSEEVLFLSCREIFERGKKLIEVIGPLLEDEAREVHMGFWR

SEQ ID NO: 153 - protein, 193 aa, synthetic construct
  REGION 1..193: note = pYY-BEM4.44; tr|E3SF31|E3SF31_9CAUD polypeptide sequence
MKPTTVLQIAYLVSQESKCCSWKVGAVIEKNGRIISTGYNGSPAGGVNCCEHAEEQGWLLNKPKPVLIPGHKSECVRFSQVDRFVLAKAHREAHSAWSKNNEIHAELNAILFAARMGSSIEGATMYVTLSPCPDCAKAISQSGIKKLVYCETYDKNIPGWDDILKNAGIEVFNVPKRSLDKLNWENINEFCGE

SEQ ID NO: 154 - protein, 330 aa, synthetic construct
  REGION 1..330: note = pYY-BEM4.45; tr|F8AAC6|F8AAC6_THEID polypeptide sequence
MIRAPWHEYFMLLAKIVALRSGCNSRPSGAVIVKNKRILATGYNGPMPGAWHCTDRGPGYCFRREKGIPDIDKYNFCRATHAEANAIAQAARFGISVEGASLYCTLAPCYVCLKLIASAGIKKVYYEHDYGSRDFERDQFWKEAIKEAGLEKFEQITVSQEVMEQLQEILPYPTSKRRLAPTEFLDEFEDGKKYGVPSIEVLFNKLNYLTRQALKDITFVIEKTTVTEEPEGISFYLSGKMVELSELINTVKKQINADQNFYFLAKHNAIEAKIEILREAENIRLKAFLNECPLESFKRIAESLDYILYQVSNSLSLPTRLELSVNLLRI

SEQ ID NO: 155 - protein, 158 aa, synthetic construct
  REGION 1..158: note = pYY-BEM4.46; tr|A0A2H4ZNK4|A0A2H4ZNK4_9EUKA polypeptide sequence
MKKQLSRKIQEEWMSRLLRNAYDAGTYGEVPIAAVILNESGQCIGWGRNCREKDQNPLGHAEIIALRQASYLKKSWRFNECTMLVTLEPCPMCAGALLQARINHIIYGASDYKRGGFGGVLDLSKNSSAHHKIEITRGVKSIQSCQLLETWFRRRRRV

SEQ ID NO: 156 - protein, 176 aa, synthetic construct
  REGION 1..176: note = pYY-BEM4.47; tr|A0A239N5N1|A0A239N5N1_9PSED polypeptide sequence
MEGRAGIIPFDEGGAAMGPAEEDSPMQHLAYMREALALARANVEAGGRPFGAVLVRDGEVIARAANGTHLDHDPTAHAELLALRAAGRALGSPRLDGCVVYASGHPCPMCLAAMHLSGVSAAYYAYSNADGEPYGLSTAAVYAQMAQPVEWQSLPLQALRPEDEEGLYGFWRERRP

SEQ ID NO: 157 - protein, 199 aa, synthetic construct
  REGION 1..199: note = pYY-BEM4.48; tr|A0A328VTR2|A0A328VTR2_9PSED polypeptide sequence
MHPEHLALLQQAPASTHADDTWARLCCEQALLAVEEGCYAVGALLVDGAGELLCSGRNQVFAPAYASAAHAEMRVLDQLEAEHAQVDRRSLTLYVSLEPCLMCYGRILLAGITRVRYLARDRDGGFALRHGRLPPAWANLASGLSVVQAKADPYWLDLAEHAIGRLQDRQTLRQRVIRAWRGQRTLTDEFSSTKRTHSG

SEQ ID NO: 158 - protein, 402 aa, synthetic construct
  REGION 1..402: note = pYY-BEM4.49; tr|A0A103YG48|A0A103YG48_CYNCS polypeptide sequence
YIRELHASSLRRDEHEIQNPKILVIVDRLSSPSLHVSLSLSLSLVIFPPFIPLNQTPTHMENAKVVEAKDGTIAVASAFSGHQEVVQDRDHKFLTRAVEEAYKGVECGDGGPFGAVVVHKDEVVASCHNMVLKHTDPTAHAEVTAIREACKKLNKIELSDCEIYASCEPCPMCFGAIHLSRIKRLIYGAKAEAAIAIGFDDFIADALRGTGFYQKAHLEIKQADGNGAMIAEQVFEKTKAKFAIDHKFLTRAVEEAYKGVECGDGRPFGALVVHKDEVVVSCHNMVLNYTDPTAHAEITAIREACKKLNRIELSDCEMYSSCEPCPMCFGAIQISRIKRLVYGAKAEASIASGIPIGDFISDALKGTGFHEKANFEIKQADGNGAMIAEQVFERTKAMFPKR

SEQ ID NO: 159 - protein, 195 aa, synthetic construct
  REGION 1..195: note = pYY-BEM4.50; tr|W5M1M8|W5M1M8_LEPOC polypeptide sequence
NSSTRESRVMAQMEINGGASPPKKPGKGQSAADQDMITGLINKALQAKEFAYCPYSNFRVGAALMTNDGRVFTGCNVENACYNLGVCAERTAILKAVSEGYESFRAIAVSSDLQDQFISPCGACRQVMREFGTGWDVFLTKVDGSYVRMTVDELLPMSFGPDDLKKKKVFSLQNGHEVSTQFYTHSPCEAGENNN

SEQ ID NO: 160 - protein, 134 aa, synthetic construct
  REGION 1..134: note = pYY-BEM4.51; tr|A0A3N5YPZ2|A0A3N5YPZ2_9ALTE polypeptide sequence
MSNSETEHIQALVDAAQAAQKQSYSPYSSFQVGAAIFADDGNTYSGCNIENVAYPLGQCAEATAIGMMIMQGAKRIEDIMIASPNDQVCPPCGGCRQKISEFGTAETKIHMVTRSGEVSTVTLGELLPLAFDSL

SEQ ID NO: 161 - protein, 162 aa, synthetic construct
  REGION 1..162: note = pYY-BEM4.52; tr|A0A2A9NC86|A0A2A9NC86_9AGAR polypeptide sequence
MTNSTLSNEDRTRLIQGAFQARKKTYSPYSNFPVGAALLTTDGRIIEGANIENASYGGTICAERTAIVKAVSDGYRHFAGIAVTTKMPTRVSPCGICRQVLREFCSLDMPVLLVPGDYPQRNPVDDDGADKPGVITEGGVRETTLGALLPDSFGPENLPPRA

SEQ ID NO: 162 - protein, 163 aa, synthetic construct
  REGION 1..163: note = pYY-BEM4.53; tr|A0A2D6RD43|A0A2D6RD43_9GAMM polypeptide sequence
MNIENLITENDETLIRRCIELAGESVKNGDKPFGALLAKDGNIIFESSNNAKTKVPYHAEILTLMDAQDKLNTTDLSDYALYSNCEPCPMCSFMIREYKLDKVVFSVHSPYMGGQSRWNILEDDVLTRFKPYFSKPPNVVGGVLESEGKRIFDKVGLWMFGKE

SEQ ID NO: 163 - protein, 204 aa, synthetic construct
  REGION 1..204: note = pYY-BEM4.54; tr|A0A0H3AVL6|A0A0H3AVL6_BRUO2 polypeptide sequence
MHAKGYSQQERRIIPFANRFRFRELCSNKSLHGLRAKFPEQYTKWDPMRKAASITKANSATPMDIALEEAHAAGERGEVPIGAVIVRDGEIIARAGNRTREFNDVTAHAEILTIRQAGEMLGSERLIDCDLYVTLEPCAMCAAAISFARIRRLYYGASDPKGGGIEHGGRFYTQPTCHHAPEIYPGFCEADARKILKDFFREKR

SEQ ID NO: 164 - protein, 165 aa, synthetic construct
  REGION 1..165: note = pYY-BEM4.55; tr|A0A242H531|A0A242H531_9ENTE polypeptide sequence
MFIVKNNIEVIQQQAELDAKFMKQALKLAKDASNNGNEPFGAVLVKNDKVILTGENQIHTESDPTYHAELGIIRDFCTSQKITDLSEYTLYTSCEPCCMCAGAMVWSNLDRMVYGLGHDELAEIAGFNIMIGSEEIFSKSPNRPEVAKGVLKEAAVPVYVDYFQR

SEQ ID NO: 165 - protein, 181 aa, synthetic construct
  REGION 1..181: note = pYY-BEM4.56; tr|A0A2R6XZE2|A0A2R6XZE2_9BACL polypeptide sequence
MSGRISWHEYFMAQAKLIALRATCTRLMVGAVIVRDRRVIAGGYNGSIAGDEHCIDVGCKVRDGHCIRTIHAEQNALMQCAKFGVSTDGAELYVTHFPCLNCTKLLIQAGIRHIYYEVPYRVDPYAIELLEKAGVGTTQITVDLNAYVQVMSKVSTDPALTYVPESKAQKDEYGQSVGKIV

SEQ ID NO: 166 - protein, 173 aa, synthetic construct
  REGION 1..173: note = pYY-BEM4.57; tr|A0A139SHT6|A0A139SHT6_9BACT polypeptide sequence
MSEANASSESLPSRNSPVELIAEAAGKFGRRPTWDEYFMATAVLISTRSSCERLNVGCVIVTAGESHKNRIVAAGYNGHLPGSPHTSRMRDGHEQATVHAEQNAISDAARRGSSVEGCTAYVTHYPCINCAKILASAGIAKICYRLDYHNDPLVKPMLAEAGIEIVQLGEAAS

SEQ ID NO: 167 - protein, 170 aa, synthetic construct
  REGION 1..170: note = pYY-BEM4.58; tr|A0A261DBH2|A0A261DBH2_9RICK polypeptide sequence
MVMKKKLITVKRSTEFNNFFMEEALKQAQFALDKNEIPVGAIIVNRITNKVIAKAHNIVEQTKNPVLHAEIVAINQSCQILSSKNLSDCDMYVTLEPCVMCSGAISFARIGRLFYAANDPKQGAIENGGRFFNSKSCFYRPEIYSGFSAKISENLIKEFFYNVRYQKCNP

SEQ ID NO: 168 - protein, 146 aa, synthetic construct
  REGION 1..146: note = pYY-BEM4.59; tr|A0A2N0XZK6|A0A2N0XZK6_9VIBR polypeptide sequence
MTDNSLHESYMRQAFELSKSALPGCRPNPPVGCVFVKDGEVVSSGFSQPPGNHHAEAGAIAAYTGSYDGLVAYVTLEPCSFQGRTPSCAKALVRVRPEKVYVAILDPDTRNSGAGIKILEDAGIDVEVGLLGEEVASFLNPYLIRN

SEQ ID NO: 169 - protein, 159 aa, synthetic construct
  REGION 1..159: note = pYY-BEM4.60; tr|A0A1V5R0F9|A0A1V5R0F9_9BACT polypeptide sequence
MTKKETTKLHALDDFCMKKALLLAKRAFRADEVPVGALVVDSSNKVIGRGYNQVEKRKSQRAHAEQLAIEQACKKIGDWRLEGCTLYVTLEPCTMCMGLIKLSRIERVVFGAASPLFGYQLDKNRKSQLYKKGVIKIRKGVGKATAAALLKDFFKNKRM

SEQ ID NO: 170 - protein, 167 aa, synthetic construct
  REGION 1..167: note = pYY-BEM4.61; tr|A0A2W0H8Y3|A0A2W0H8Y3_9BACI polypeptide sequence
MKNNGRLDHEYFMTEALQEAKEAGQRGDLPIGAVIVHNGRIIARGSNMRKTAGIKISHAENNAMHNCAPYLMKHASECVIYTTLEPCIMCLTTLVMANIDSIVFAADDKYMNMKPFIDANSYIRDRIHQYKGGVCRGESEALLRKYSPYAAELALNGTHPHHRKGGA

SEQ ID NO: 171 - protein, 165 aa, synthetic construct
  REGION 1..165: note = pYY-BEM4.62; tr|A0A261BDB7|A0A261BDB7_CAERE polypeptide sequence
LYKLYIFRMTTTKANLTQFEQELVDKAVGAMEKAYCKYSGFKVGAALVCEDGEIIIGANHENASYGATICAERSAMVTALTKGHRKFKLLAVATELEAPCSPCGICRQYLIEFGDYKVILGSSTSDQIIETTTYGLLPYAFTPKSLDDHEKEAEERNHQEGEKKH

SEQ ID NO: 172 - protein, 162 aa, synthetic construct
  REGION 1..162: note = pYY-BEM4.63; tr|A0A2E1PHI6|A0A2E1PHI6_9GAMM polypeptide sequence
MKELLIHSWLMLNSNSKLIMERVIELSEINLKNGKIPIAAVIVDKKNYEIISESQNEDSPIGHAELLAITKALKKLNTNRLDSTNLFVTIEPCPMCAYAISKCHINRLYFGSEDEKGGGVINGPRIFESHNLKKIDYVSHCYHEKTTQLMQSFFQLKRNQQL

SEQ ID NO: 173 - protein, 133 aa, synthetic construct
  REGION 1..133: note = pYY-BEM4.64; tr|A0A378LUA7|A0A378LUA7_9GAMM polypeptide sequence
MDTIIKKMISNAHNTLAHSYSPYSKFSVASCICTDKDNFYTGVNVENSAYGLAICAETSAISAMVTAGEKRIKSMVVMAGTNILCSPCGACRQRIYEFSTPDTLIHLCDKNSILRTFKINELLPEAFKFDFNP

SEQ ID NO: 174 - protein, 370 aa, synthetic construct
  REGION 1..370: note = pYY-BEM4.65; tr|A0A139HQ78|A0A139HQ78_9PEZI polypeptide sequence
MADSLKSKPGHARHDTALIHGLSQSDVQKLSESCVDAKSKAYCPYSHFRVGCAVLLANGDVVQGANVENAAYPVGTCAERVALGTAVGAKKGDFRALAVSTDISPPASPCGMCRQFIREFCELNTPILMYDKDGKSVVMTLEQLLPMSFGPDKLLPPGQLENGLMQTQTQSSFVTRAFSTTSSRRQDDTPQVPQSHYDFFPQTFPQGPPPKTSFSPDLKQLRKEFLQLQAKAHPDLAPQDQKRRAEALSMRINEAYKTLQSPLRRAQYLLSQQGIDVEDETAKLDDSSLLMEVMEAREAVEEVEDEEQLNEIRAENNGRIEESVRVLEDAFRDNEFEKAAQEAIRLRYWVNIEESIQGWEKGNGGGILHH

SEQ ID NO: 175 - protein, 165 aa, synthetic construct
  REGION 1..165: note = pYY-BEM4.66; tr|A0A2A9FXV0|A0A2A9FXV0_9VIBR polypeptide sequence
MCNLKENKDMDKYFHFACDATIEGMREGTGGPFGATLTRNGEVVCSVANTVLKDMDISGHAEMVAVREACKKLDTLDLSDCVMYATCEPCPMCVSVMLWAGIKTCYYASTHLDAAKHGFSDQQLRDYLDGSDTSTLNMVHIEDNRDDCAKIWTEFRHLNETKNDG

SEQ ID NO: 176 - protein, 509 aa, synthetic construct
  REGION 1..509: note = pYY-BEM4.67; tr|A0A1A8AG96|A0A1A8AG96_NOTFU polypeptide sequence
MEHSDRWSRAEPGLSTSSRETRDGSTQTDCKLQGHGPRLSKVNLFTLLSLWMELFPQEQDEENGQSQIRRSGLVVVREGKVVGLHCSGADLHAGQAAILQHGASLANCQLFFSRRPCATCLKMIINAGVRQITFWPGDPEISMLTSNQTHSQRTSQSITEASLDATAVEKLKSNSRPQICVLMQPLAPGVLQFVDETSRRSDFMERMMDDDPELDSEKLFNSDRLRHLKDFCRHFLIQTDQRHKDILSQMGLKNFCVEPYFSNLRSNMTELVEVLAAVAAGMPQQHYGFYREESLSLDPHPVDVSQAVARHCIVQARLLSYRTEDPKVGVGAVIWAKGQSACCCGTGRLYLIGCGYNAYPAGSKYAEYPQMDNKQEDRERRKYRYIVHAEQNALTFRTRDIKPDECSMLFVTKCPCDECIPLIRGAGVKHIYTSDQDRDKDKGDISYLRFGSLKGVCKFIWQRSPPVSSASSLHLTNGCVGKHVRQAEQQIYKNKKLCTKGSSGSSDIC

SEQ ID NO: 177 - protein, 148 aa, synthetic construct
  REGION 1..148: note = pYY-BEM4.68; tr|A0A3E2VN88|A0A3E2VN88_9FIRM polypeptide sequence
MEKEITNMDKQKLIQMAVDGLGRSYAPYSHFHVSAALLCADGTVYTGNNIENAAYTPSVCAERCAIFKAVGDGRREFEAIAVCGGPDGVIEDYCPPCGVCRQVMREFCDPSSFRVLVAKTAEDYREYTLEQLLPDGFGPDHLTGSGER

SEQ ID NO: 178 - protein, 221 aa, synthetic construct
  REGION 1..221: note = pYY-BEM4.69; tr|A0A2D5ZRJ2|A0A2D5ZRJ2_9BACT polypeptide sequence
MARPVHLHTGERRTEEGATESRAVAAVATAITRAPRAPPRPATGRERDGPPPRRVFGGGLRVGDPSGYDRGESKPIGGPLTEKRSDWHSYFMRIAGEVATRATCDRKHVGAVIVRNRTILSTGYNGSIRGMPHCDDVGHDMVDGHCIATIHAEANAILQAARNGVMIQDGSIYITASPCWNCFKLVANAGLKRVYYGEFYRDKRSFEVARRLGIDLMHIEV

SEQ ID NO: 179 - protein, 155 aa, synthetic construct
  REGION 1..155: note = pYY-BEM4.70; tr|A0A1B8WPS3|A0A1B8WPS3_9BACI polypeptide sequence
MEGVQLIYQFQWGNLIMTVNKEDLYLIDVARNTIKTLYVDGKHHVGAAVRTKTGKIYSAVHLEANIGRVSVCAEAIALGKAISEGESEFDTIVAVRHPDPTQENQKIEVVSPCGICRELISDYGKGTNVILKNKEGYIKTVISDLLPNKYIREDN

SEQ ID NO: 180 - protein, 156 aa, synthetic construct
  REGION 1..156: note = pYY-BEM4.71; tr|A0A1W5ZQK9|A0A1W5ZQK9_9BACI polypeptide sequence
MNRFMERAVSLAAENVRVGGQPFGAVLVKDDELVAEGVNEMHLNYDVSGHAELLAIRRAQGELQTHDLSGYTMYASGEPCPMCLSAMYFAGIKDVFYCATVEEAAQVGLEKSKNVYDDLQKSKGERSLVMKQMPLEDDQEDPMKLWDERTNHNGTS

SEQ ID NO: 181 - protein, 340 aa, synthetic construct
  REGION 1..340: note = pYY-BEM4.72; tr|A0A378V0W4|A0A378V0W4_MYCFO polypeptide sequence
MVHAQFDPTARQALAATAVEAKTRKDLTWQQIADAAELSPAFVTAAVLGQHALPARSAEAVAALLGLDDDAALLLQTIPIRGSIPGGIPTDPTIYRFYEMLQVYGTTLKALVHEQFGDGIISAINFKLDVRKVADPEGGERAVITLDGKYLPPNPFDRVRYRGGLMDFAQRTIDIARQNVAEGGRPFATVIVKNGEILAESPNLVAQTHDPTAHAEILAIRKACTRIGTEHLIGATIYVLAQPCPMCLGSLYYCSPDEVVFLTTRDAYEPHYVDDRKYFELNMFYDEFAKPWDQRRLPMRYEPRDAAVDVYKLWQERNGGERRVPGAPTSTRPGKNPRGE

SEQ ID NO: 182 - protein, 157 aa, synthetic construct
  REGION 1..157: note = pYY-BEM4.73; tr|I3XF03|I3XF03_RHIFR polypeptide sequence
MKQRCMSPKSAQRFWDNDMHNNKDRPMSENELFVAAREAMAKAHAPYSKFPVGAAIRAEDGQIYTGANIENLSFPEGWCAETTAISHMVMAGQRKIMEVAVIAEKLALCPPCGGCRQRLAEFSGASTRIYLCDETGIKKSLALSDLLPHSFETEILG

SEQ ID NO: 183 - protein, 595 aa, synthetic construct
  REGION 1..595: note = pYY-BEM4.74; tr|F8IEF3|F8IEF3_ALIAT polypeptide sequence
MDAKELETRGWLCMRAVDVIDKKRRGEALAEEELRFLIEGYVAGRIPDYQMSAFLMAVVWRGMTREETLVLTRLLADSGERLDLSGIPGVKVDKHSTGGVGDKATLVVLPLVASIGVPVIKMSGRGLGHTGGTIDKLESIPGFRTDLSVAELVAQVRQVGIALGGQTADLAPADKKLYALRDVTGTVESLPLIASSVMSKKLAGGADAIVLDVKVGDGAFMKSRSDARRLARLMVEIGEAAGRRTVAVLSNMDQPLGCAIGNALEVAEAIRVLSGEGPFDLAEIALALAEEMTVLAGVAATREEARRMLRQSVAEGRALETLRRWIAAQGGDPAVVDDPSRLPQAPVQMPYLPKKAGFVAKLSALAFGLAAMRLGAGRETKEEAIDPSVGIVLHAKVGDRVQTHRPMFTVHARTGEDALRCIQELEAAIQISDDPVEAPPLILARIDRSEALPYADLMDAAREARDRAYVPYSGFAVGAALELADGRMVTGANVENASYGLTNCAERSAVFRAVAEGGPGTKPEIRAVAVIADSPEPVSPCGACRQVLAEFCSPDTPVYLGNLQGDVRETTVGALLPGAFTDAQMANVRRQDKEA

SEQ ID NO: 184 - protein, 153 aa, synthetic construct
  REGION 1..153: note = pYY-BEM4.75; tr|A0A1G3M638|A0A1G3M638_9SPIR polypeptide sequence
MKTTNINALDKWDLRFLQMAEHVAEWSKDPSTKVGAVIVRPDRTIASVGFNGFARGVRDTVERLWNRELKYPLTVHAELNAILSAHEPVRGHSLYVSPLSPCSNCAGVIIQSGIARVVAKCGQVNNPAQWSESFNLALTAFAEAGVSVILVEH

SEQ ID NO: 185 - protein, 177 aa, synthetic construct
  REGION 1..177: note = pYY-BEM4.76; tr|A0A3D9LFR2|A0A3D9LFR2_9MICC polypeptide sequence
MEQNDHGSSGAFSDPFEDDIPLTASLPRITGTGSGIDWQRLESTARAAMTRAYVPYSRFPVGAAALVEDGRVVAGCNIENASLGLTLCAECSLVSNLQMSGGGRIVAFYCVDGNGEVLMPCGRCRQLLYEFHAPGMRLMGPDGELTMDEVLPLAFGPADMTHLSDSAASTDDPGRTR

SEQ ID NO: 186 - protein, 172 aa, synthetic construct
  REGION 1..172: note = pYY-BEM4.77; tr|A0A3B9YGB5|A0A3B9YGB5_9BACT polypeptide sequence
MAKPISKKYRKLIETAKAARKKAYSPYSRYQVGAAVLTESGRIYSGANMENASYGLCMCAERVAIANAVTRGEKVLQAVCVVGKKARPCGACRQVMLEFSTKETELLMVDIDPNARRDTVIRTRVYSMLPNPFDPFESGMLPQHPQNLLRRRKSPQPRRKRRSRPVHREVSR

SEQ ID NO: 187 - protein, 391 aa, synthetic construct
  REGION 1..391: note = pYY-BEM4.78; tr|A0A182F569|A0A182F569_ANOAL polypeptide sequence
MPRPSQFRVSSSQSLSNSQIQASQSSDSVVDITSYVNAVVKALLNLSCTKTIIKRADLVNIALKGNGRLIGRVLQDANIELKEIYGYELIEVEKSKTMILCSTLAAGSMDELNDANRRRYTFLYLILGYIFMKNGSVPETIVWEFLETLGIEEQQEHNYFGDVRKLYDSLFKQAYLTRTKQALEGLNDDVMLISWGVRSKHEVSKKDILAGFCKVMNRDPVDFKAQYIEANEKDDKMNNNINGTVDGRNTVEYSSLDASVKELIEAAIKVRNNAYCPYSNFAVGAALRTVGGDIVTGCNVENGTFGPSVCAERTAVCKAVSEGHREFTAVAVVAFQETEFTAPCGTCRQTLSEFSRKDIPIYLVKPSPVRVMVTSLFQLLPHAFSPSFLNK

SEQ ID NO: 188 - protein, 151 aa, synthetic construct
  REGION 1..151: note = pYY-BEM4.79; tr|A0A264Z0D4|A0A264Z0D4_9BACI polypeptide sequence
MEPKKLIEEAIVASKQAYVQYSNFHVGAALLTKDGKLYHGCNIENASYGLTNCAERTAIFKAVSEGEKEFQAIAVVGDTEGPISPCGACRQVLAEFFSPDTVVILANLKGDHVVTNINELLPGFFSSKDLQKKVKNCFEKNALGSSCLRPI

SEQ ID NO: 189 - protein, 229 aa, synthetic construct
  REGION 1..229: note = pYY-BEM4.80; tr|A0A1L9Q1R3|A0A1L9Q1R3_ASPVE polypeptide sequence
MPLSAEEAALVETATATINSIPLSEDYSVASAAKASDGRVFTGVNVYHFTGGPCAELVVLGVAAAAGAAQLTHIVAVANEQRGILSPCGRCRQVLLDLQPNIQVIVGKEGSEQSVPVAQLLPFSYRQPDQHTPVIFKALTSSGPVVVDFFATWCGPCKAVAPVVGKLSETYTDVRFIQVDVDKARSISQEHDIRAMPTFVLYKDGKLLDKRVVGGNMKELEEQIKAIIA

SEQ ID NO: 190 - protein, 18 aa, synthetic construct
  REGION 1..18: note = synthetic peptide
KRTADGSEFESPKKKRKV

SEQ ID NO: 191 - protein, 16 aa, synthetic construct
  REGION 1..16: note = synthetic peptide
KRPAATKKAGQAKKKK

SEQ ID NO: 192 - protein, 17 aa, synthetic construct
  REGION 1..17: note = synthetic peptide
KKTELQTTNAENKTKKL

SEQ ID NO: 193 - protein, 19 aa, synthetic construct
  REGION 1..19: note = synthetic peptide
KRGINDRNFWRGENGRKTR

SEQ ID NO: 194 - protein, 16 aa, synthetic construct
  REGION 1..16: note = synthetic peptide
RKSGKIAAIVVKRPRK

SEQ ID NO: 195 - protein, 7 aa, synthetic construct
  REGION 1..7: note = synthetic peptide
PKKKRKV

SEQ ID NO: 196 - protein, 30 aa, synthetic construct
  REGION 1..30: note = synthetic polypeptide
MDSLLMNRRKFLYQFKNVRWAKGRRETYLC

SEQ ID NO: 197 - protein, 1368 aa, Streptococcus pyogenes [sequence omitted]

SEQ ID NO: 198 - DNA, 4104 bp, Streptococcus pyogenes
  misc_feature 1..4104: note = wild type spCas9 polynucleotide sequence
  source 1..4104: mol_type = genomic DNA
atggataagaaatactcaataggcttagatatcggcacaaatagcgtcggatgggcggtgatcactgatgattataaggttccgtctaaaaagttcaaggttctgggaaatacagaccgccacagtatcaaaaaaaatcttataggggctcttttatttggcagtggagagacagcggaagcgactcgtctcaaacggacagctcgtagaaggtatacacgtcggaagaatcgtatttgttatctacaggagattttttcaaatgagatggcgaaagtagatgatagtttctttcatcgacttgaagagtcttttttggtggaagaagacaagaagcatgaacgtcatcctatttttggaaatatagtagatgaagttgcttatcatgagaaatatccaactatctatcatctgcgaaaaaaattggcagattctactgataaagcggatttgcgcttaatctatttggccttagcgcatatgattaagtttcgtggtcattttttgattgagggagatttaaatcctgataatagtgatgtggacaaactatttatccagttggtacaaatctacaatcaattatttgaagaaaaccctattaacgcaagtagagtagatgctaaagcgattctttctgcacgattgagtaaatcaagacgattagaaaatctcattgctcagctccccggtgagaagagaaatggcttgtttgggaatctcattgctttgtcattgggattgacccctaattttaaatcaaattttgatttggcagaagatgctaaattacagctttcaaaagatacttacgatgatgatttagataatttattggcgcaaattggagatcaatatgctgatttgtttttggcagctaagaatttatcagatgctattttactttcagatatcctaagagtaaatagtgaaataactaaggctcccctatcagcttcaatgattaagcgctacgatgaacatcatcaagacttgactcttttaaaagctttagttcgacaacaacttccagaaaagtataaagaaatcttttttgatcaatcaaaaaacggatatgcaggttatattgatgggggagctagccaagaagaattttataaatttatcaaaccaattttagaaaaaatggatggtactgaggaattattggtgaaactaaatcgtgaagatttgctgcgcaagcaacggacctttgacaacggctctattccccatcaaattcacttgggtgagctgcatgctattttgagaagacaagaagacttttatccatttttaaaagacaatcgtgagaagattgaaaaaatcttgacttttcgaattccttattatgttggtccattggcgcgtggcaatagtcgttttgcatggatgactcggaagtctgaagaaacaattaccccatggaattttgaagaagttgtcgataaaggtgcttcagctcaatcatttattgaacgcatgacaaactttgataaaaatcttccaaatgaaaaagtactaccaaaacatagtttgctttatgagtattttacggtttataacgaattgacaaaggtcaaatatgttactgagggaatgcgaaaaccagcatttctttcaggtgaacagaagaaagccattgttgatttactcttcaaaacaaatcgaaaagtaaccgttaagcaattaaaagaagattatttcaaaaaaatagaatgttttgatagtgttgaaatttcaggagttgaagatagatttaatgcttcattaggcgcctaccatgatttgctaaaaattattaaagataaagattttttggataatgaagaaaatgaagatatcttagaggatattgttttaacattgaccttatttgaagatagggggatgattgaggaaagacttaaaacatatgctcacctctttgatgataaggtgatgaaacagcttaaacgtcgccgttatactggttggggacgtttgtctcgaaaattgattaatggtattagggataagcaatctggcaaaacaatattagattttttgaaatcagatggttttgccaatcgcaattttatgcagctgatccatgatgatagtttgacatttaaagaagatattcaaaaagcacaggtgtctggacaaggccatagtttacatgaacagattgctaacttagctggcagtcctgctattaaaaaaggtattttacagactgtaaaaattgttgatgaactggtcaaagtaatggggcataagccagaaaatatcgttattgaaatggcacgtgaaaatcagacaactcaaaagggccagaaaaattcgcgagagcgtatgaaacgaatcgaagaaggtatcaaagaattaggaagtcagattcttaaagagcatcctgttgaaaatactcaattgcaaaatgaaaagctctatctctattatctacaaaatggaagagacatgtatgtggaccaagaattagatattaatcgtttaagtgattatgatgtcgatcacattgttccacaaagtttcattaaagacgattcaatagacaataaggtactaacgcgttctgataaaaatcgtggtaaatcggataacgttccaagtgaagaagtagtcaaaaagatgaaaaactattggagacaacttctaaacgccaagttaatcactcaacgtaagtttgataatttaacgaaagctgaacgtggaggtttgagtgaacttgataaagctggttttatcaaacgccaattggttgaaactcgccaaatcactaagcatgtggcacaaattttggatagtcgcatgaatactaaatacgatgaaaatgataaacttattcgagaggttaaagtgattaccttaaaatctaaattagtttctgacttccgaaaagatttccaattctataaagtacgtgagattaacaattaccatcatgcccatgatgcgtatctaaatgccgtcgttggaactgctttgattaagaaatatccaaaacttgaatcggagtttgtctatggtgattataaagtttatgatgttcgtaaaatgattgctaagtctgagcaagaaataggcaaagcaaccgcaaaatatttcttttactctaatatcatgaacttcttcaaaacagaaattacacttgcaaatggagagattcgcaaacgccctctaatcgaaactaatggggaaactggagaaattgtctgggataaagggcgagattttgccacagtgcgcaaagtattgtccatgccccaagtcaatattgtcaagaaaacagaagtacagacaggcggattctccaaggagtcaattttaccaaaaagaaattcggacaagcttattgctcgtaaaaaagactgggatccaaaaaaatatggtggttttgatagtccaacggtagcttattcagtcctagtggttgctaaggtggaaaaagggaaatcgaagaagttaaaatccgttaaagagttactagggatcacaattatggaaagaagttcctttgaaaaaaatccgattgactttttagaagctaaaggatataaggaagttaaaaaagacttaatcattaaactacctaaatatagtctttttgagttagaaaacggtcgtaaacggatgctggctagtgccggagaattacaaaaaggaaatgagctggctctgccaagcaaatatgtgaattttttatatttagctagtcattatgaaaagttgaagggtagtccagaagataacgaacaaaaacaattgtttgtggagcagcataagcattatttagatgagattattgagcaaatcagtgaattttctaagcgtgttattttagcagatgccaatttagataaagttcttagtgcatataacaaacatagagacaaaccaatacgtgaacaagcagaaaatattattcatttatttacgttgacgaatcttggagctcccgctgcttttaaatattttgatacaacaattgatcgtaaacgatatacgtctacaaaagaagttttagatgccactcttatccatcaatccatcactggtctttatgaaacacgcattgatttgagtcagctaggaggtgactga

SEQ ID NO: 199 - protein, 1367 aa, Streptococcus pyogenes
  REGION 1..1367: note = MISC_FEATURE - spCas9 polypeptide sequence
MDKKYSIGLDIGTNSVGWAVITDDYKVPSKKFKVLGNTDRHSIKKNLIGALLFGSGETAEATRLKRTARRRYTRRKNRICYLQEIFSNEMAKVDDSFFHRLEESFLVEEDKKHERHPIFGNIVDEVAYHEKYPTIYHLRKKLADSTDKADLRLIYLALAHMIKFRGHFLIEGDLNPDNSDVDKLFIQLVQIYNQLFEENPINASRVDAKAILSARLSKSRRLENLIAQLPGEKRNGLFGNLIALSLGLTPNFKSNFDLAEDAKLQLSKDTYDDDLDNLLAQIGDQYADLFLAAKNLSDAILLSDILRVNSEITKAPLSASMIKRYDEHHQDLTLLKALVRQQLPEKYKEIFFDQSKNGYAGYIDGGASQEEFYKFIKPILEKMDGTEELLVKLNREDLLRKQRTFDNGSIPHQIHLGELHAILRRQEDFYPFLKDNREKIEKILTFRIPYYVGPLARGNSRFAWMTRKSEETITPWNFEEVVDKGASAQSFIERMTNFDKNLPNEKVLPKHSLLYEYFTVYNELTKVKYVTEGMRKPAFLSGEQKKAIVDLLFKTNRKVTVKQLKEDYFKKIECFDSVEISGVEDRFNASLGAYHDLLKIIKDKDFLDNEENEDILEDIVLTLTLFEDRGMIEERLKTYAHLFDDKVMKQLKRRRYTGWGRLSRKLINGIRDKQSGKTILDFLKSDGFANRNFMQLIHDDSLTFKEDIQKAQVSGQGHSLHEQIANLAGSPAIKKGILQTVKIVDELVKVMGHKPENIVIEMARENQTTQKGQKNSRERMKRIEEGIKELGSQILKEHPVENTQLQNEKLYLYYLQNGRDMYVDQELDINRLSDYDVDHIVPQSFIKDDSIDNKVLTRSDKNRGKSDNVPSEEVVKKMKNYWRQLLNAKLITQRKFDNLTKAERGGLSELDKAGFIKRQLVETRQITKHVAQILDSRMNTKYDENDKLIREVKVITLKSKLVSDFRKDFQFYKVREINNYHHAHDAYLNAVVGTALIKKYPKLESEFVYGDYKVYDVRKMIAKSEQEIGKATAKYFFYSNIMNFFKTEITLANGEIRKRPLIETNGETGEIVWDKGRDFATVRKVLSMPQVNIVKKTEVQTGGFSKESILPKRNSDKLIARKKDWDPKKYGGFDSPTVAYSVLVVAKVEKGKSKKLKSVKELLGITIMERSSFEKNPIDFLEAKGYKEVKKDLIIKLPKYSLFELENGRKRMLASAGELQKGNELALPSKYVNFLYLASHYEKLKGSPEDNEQKQLFVEQHKHYLDEIIEQISEFSKRVILADANLDKVLSAYNKHRDKPIREQAENIIHLFTLTNLGAPAAFKYFDTTIDRKRYTSTKEVLDATLIHQSITGLYETRIDLSQLGGD

SEQ ID NO: 200 - DNA, 4212 bp, synthetic construct
  misc_feature 1..4212: note = wild-type Cas9 polynucleotide sequence
  misc_feature 5..58: note = RuvC domain
  misc_feature 718..764: note = RuvC domain
  misc_feature 772..901: note = HNH domain
  misc_feature 906..1101: note = RuvC domain
  source 1..4212: mol_type = other DNA
atggataaaaagtattctattggtttagacatcggcactaattccgttggatgggctgtcataaccgatgaatacaaagtaccttcaaagaaatttaaggtgttggggaacacagaccgtcattcgattaaaaagaatcttatcggtgccctcctattcgatagtggcgaaacggcagaggcgactcgcctgaaacgaaccgctcggagaaggtatacacgtcgcaagaaccgaatatgttacttacaagaaatttttagcaatgagatggccaaagttgacgattctttctttcaccgtttggaagagtccttccttgtcgaagaggacaagaaacatgaacggcaccccatctttggaaacatagtagatgaggtggcatatcatgaaaagtacccaacgatttatcacctcagaaaaaagctagttgactcaactgataaagcggacctgaggttaatctacttggctcttgcccatatgataaagttccgtgggcactttctcattgagggtgatctaaatccggacaactcggatgtcgacaaactgttcatccagttagtacaaacctataatcagttgtttgaagagaaccctataaatgcaagtggcgtggatgcgaaggctattcttagcgcccgcctctctaaatcccgacggctagaaaacctgatcgcacaattacccggagagaagaaaaatgggttgttcggtaaccttatagcgctctcactaggcctgacaccaaattttaagtcgaacttcgacttagctgaagatgccaaattgcagcttagtaaggacacgtacgatgacgatctcgacaatctactggcacaaattggagatcagtatgcggacttatttttggctgccaaaaaccttagcgatgcaatcctcctatctgacatactgagagttaatactgagattaccaaggcgccgttatccgcttcaatgatcaaaaggtacgatgaacatcaccaagacttgacacttctcaaggccctagtccgtcagcaactgcctgagaaatataaggaaatattctttgatcagtcgaaaaacgggtacgcaggttatattgacggcggagcgagtcaagaggaattctacaagtttatcaaacccatattagagaagatggatgggacggaagagttgcttgtaaaactcaatcgcgaagatctactgcgaaagcagcggactttcgacaacggtagcattccacatcaaatccacttaggcgaattgcatgctatacttagaaggcaggaggatttttatccgttcctcaaagacaatcgtgaaaagattgagaaaatcctaacctttcgcataccttactatgtgggacccctggcccgagggaactctcggttcgcatggatgacaagaaagtccgaagaaacgattactccatggaattttgaggaagttgtcgataaaggtgcgtcagctcaatcgttcatcgagaggatgaccaactttgacaagaatttaccgaacgaaaaagtattgcctaagcacagtttactttacgagtatttcacagtgtacaatgaactcacgaaagttaagtatgtcactgagggcatgcgtaaacccgcctttctaagcggagaacagaagaaagcaatagtagatctgttattcaagaccaaccgcaaagtgacagttaagcaattgaaagaggactactttaagaaaattgaatgcttcgattctgtcgagatctccggggtagaagatcgatttaatgcgtcacttggtacgtatcatgacctcctaaagataattaaagataaggacttcctggataacgaagagaatgaagatatcttagaagatatagtgttgactcttaccctctttgaagatcgggaaatgattgaggaaagactaaaaacatacgctcacctgttcgacgataaggttatgaaacagttaaagaggcgtcgctatacgggctggggacgattgtcgcggaaacttatcaacgggataagagacaagcaaagtggtaaaactattctcgattttctaaagagcgacggcttcgccaataggaactttatgcagctgatccatgatgactctttaaccttcaaagaggatatacaaaaggcacaggtttccggacaaggggactcattgcacgaacatattgcgaatcttgctggttcgccagccatcaaaaagggcatactccagacagtcaaagtagtggatgagctagttaaggtcatgggacgtcacaaaccggaaaacattgtaatcgagatggcacgcgaaaatcaaacgactcagaaggggcaaaaaaacagtcgagagcggatgaagagaatagaagagggtattaaagaactgggcagccagatcttaaaggagcatcctgtggaaaatacccaattgcagaacgagaaactttacctctattacctacaaaatggaagggacatgtatgttgatcaggaactggacataaaccgtttatctgattacgacgtcgatcacattgtaccccaatcctttttgaaggacgattcaatcgacaataaagtgcttacacgctcggataagaaccgagggaaaagtgacaatgttccaagcgaggaagtcgtaaagaaaatgaagaactattggcggcagctcctaaatgcgaaactgataacgcaaagaaagttcgataacttaactaaagctgagaggggtggcttgtctgaacttgacaaggccggatttattaaacgtcagctcgtggaaacccgccaaatcacaaagcatgttgcacagatactagattcccgaatgaatacgaaatacgacgagaacgataagctgattcgggaagtcaaagtaatcactttaaagtcaaaattggtgtcggacttcagaaaggattttcaattctataaagttagggagataaataactaccaccatgcgcacgacgcttatcttaatgccgtcgtagggaccgcactcattaagaaatacccgaagctagaaagtgagtttgtgtatggtgattacaaagtttatgacgtccgtaagatgatcgcgaaaagcgaacaggagataggcaaggctacagccaaatacttcttttattctaacattatgaatttctttaagacggaaatcactctggcaaacggagagatacgcaaacgacctttaattgaaaccaatggggagacaggtgaaatcgtatgggataagggccgggacttcgcgacggtgagaaaagttttgtccatgccccaagtcaacatagtaaagaaaactgaggtgcagaccggagggttttcaaaggaatcgattcttccaaaaaggaatagtgataagctcatcgctcgtaaaaaggactgggacccgaaaaagtacggtggcttcgatagccctacagttgcctattctgtcctagtagtggcaaaagttgagaagggaaaatccaagaaactgaagtcagtcaaagaattattggggataacgattatggagcgctcgtcttttgaaaagaaccccatcgacttccttgaggcgaaaggttacaaggaagtaaaaaaggatctcataattaaactaccaaagtatagtctgtttgagttagaaaatggccgaaaacggatgttggctagcgccggagagcttcaaaaggggaacgaactcgcactaccgtctaaatacgtgaatttcctgtatttagcgtcccattacgagaagttgaaaggttcacctgaagataacgaacagaagcaactttttgttgagcagcacaaacattatctcgacgaaatcatagagcaaatttcggaattcagtaagagagtcatcctagctgatgccaatctggacaaagtattaagcgcatacaacaagcacagggataaacccatacgtgagcaggcggaaaatattatccatttgtttactcttaccaacctcggcgctccagccgcattcaagtattttgacacaacgatagatcgcaaacgatacacttctaccaaggaggtgctagacgcgacactgattcaccaatccatcacgggattatatgaaactcggatagatttgtcacagcttgggggtgacggatcccccaagaagaagaggaaagtctcgagcgactacaaagaccatgacggtgattataaagatcatgacatcgattacaaggatgacgatgacaaggctgcagga

SEQ ID NO: 201 - protein, 1368 aa, synthetic construct
  REGION 1..1368: note = exemplary catalytically active Cas9 nickase (nCas9) polypeptide sequence
MDKKYSIGLAIGTNSVGWAVITDEYKVPSKKFKVLGNTDRHSIKKNLIGALLFDSGETAEATRLKRTARRRYTRRKNRICYLQEIFSNEMAKVDDSFFHRLEESFLVEEDKKHERHPIFGNIVDEVAYHEKYPTIYHLRKKLVDSTDKADLRLIYLALAHMIKFRGHFLIEGDLNPDNSDVDKLFIQLVQTYNQLFEENPINASGVDAKAILSARLSKSRRLENLIAQLPGEKKNGLFGNLIALSLGLTPNFKSNFDLAEDAKLQLSKDTYDDDLDNLLAQIGDQYADLFLAAKNLSDAILLSDILRVNTEITKAPLSASMIKRYDEHHQDLTLLKALVRQQLPEKYKEIFFDQSKNGYAGYIDGGASQEEFYKFIKPILEKMDGTEELLVKLNREDLLRKQRTFDNGSIPHQIHLGELHAILRRQEDFYPFLKDNREKIEKILTFRIPYYVGPLARGNSRFAWMTRKSEETITPWNFEEVVDKGASAQSFIERMTNFDKNLPNEKVLPKHSLLYEYFTVYNELTKVKYVTEGMRKPAFLSGEQKKAIVDLLFKTNRKVTVKQLKEDYFKKIECFDSVEISGVEDRFNASLGTYHDLLKIIKDKDFLDNEENEDILEDIVLTLTLFEDREMIEERLKTYAHLFDDKVMKQLKRRRYTGWGRLSRKLINGIRDKQSGKTILDFLKSDGFANRNFMQLIHDDSLTFKEDIQKAQVSGQGDSLHEHIANLAGSPAIKKGILQTVKVVDELVKVMGRHKPENIVIEMARENQTTQKGQKNSRERMKRIEEGIKELGSQILKEHPVENTQLQNEKLYLYYLQNGRDMYVDQELDINRLSDYDVDHIVPQSFLKDDSIDNKVLTRSDKNRGKSDNVPSEEVVKKMKNYWRQLLNAKLITQRKFDNLTKAERGGLSELDKAGFIKRQLVETRQITKHVAQILDSRMNTKYDENDKLIREVKVITLKSKLVSDFRKDFQFYKVREINNYHHAHDAYLNAVVGTALIKKYPKLESEFVYGDYKVYDVRKMIAKSEQEIGKATAKYFFYSNIMNFFKTEITLANGEIRKRPLIETNGETGEIVWDKGRDFATVRKVLSMPQVNIVKKTEVQTGGFSKESILPKRNSDKLIARKKDWDPKKYGGFDSPTVAYSVLVVAKVEKGKSKKLKSVKELLGITIMERSSFEKNPIDFLEAKGYKEVKKDLIIKLPKYSLFELENGRKRMLASAGELQKGNELALPSKYVNFLYLASHYEKLKGSPEDNEQKQLFVEQHKHYLDEIIEQISEFSKRVILADANLDKVLSAYNKHRDKPIREQAENIIHLFTLTNLGAPAAFKYFDTTIDRKRYTSTKEVLDATLIHQSITGLYETRIDLSQLGGD

SEQ ID NO: 202 - DNA, 4107 bp, Streptococcus pyogenes
  misc_feature 1..4107: note = Cas9 from Streptococcus pyogenes (NCBI Ref. Seq.: NC_002737.2)polynucleotide sequence
  source 1..4107: mol_type = genomic DNA
atggataagaaatactcaataggcttagatatcggcacaaatagcgtcggatgggcggtgatcactgatgaatataaggttccgtctaaaaagttcaaggttctgggaaatacagaccgccacagtatcaaaaaaaatcttataggggctcttttatttgacagtggagagacagcggaagcgactcgtctcaaacggacagctcgtagaaggtatacacgtcggaagaatcgtatttgttatctacaggagattttttcaaatgagatggcgaaagtagatgatagtttctttcatcgacttgaagagtcttttttggtggaagaagacaagaagcatgaacgtcatcctatttttggaaatatagtagatgaagttgcttatcatgagaaatatccaactatctatcatctgcgaaaaaaattggtagattctactgataaagcggatttgcgcttaatctatttggccttagcgcatatgattaagtttcgtggtcattttttgattgagggagatttaaatcctgataatagtgatgtggacaaactatttatccagttggtacaaacctacaatcaattatttgaagaaaaccctattaacgcaagtggagtagatgctaaagcgattctttctgcacgattgagtaaatcaagacgattagaaaatctcattgctcagctccccggtgagaagaaaaatggcttatttgggaatctcattgctttgtcattgggtttgacccctaattttaaatcaaattttgatttggcagaagatgctaaattacagctttcaaaagatacttacgatgatgatttagataatttattggcgcaaattggagatcaatatgctgatttgtttttggcagctaagaatttatcagatgctattttactttcagatatcctaagagtaaatactgaaataactaaggctcccctatcagcttcaatgattaaacgctacgatgaacatcatcaagacttgactcttttaaaagctttagttcgacaacaacttccagaaaagtataaagaaatcttttttgatcaatcaaaaaacggatatgcaggttatattgatgggggagctagccaagaagaattttataaatttatcaaaccaattttagaaaaaatggatggtactgaggaattattggtgaaactaaatcgtgaagatttgctgcgcaagcaacggacctttgacaacggctctattccccatcaaattcacttgggtgagctgcatgctattttgagaagacaagaagacttttatccatttttaaaagacaatcgtgagaagattgaaaaaatcttgacttttcgaattccttattatgttggtccattggcgcgtggcaatagtcgttttgcatggatgactcggaagtctgaagaaacaattaccccatggaattttgaagaagttgtcgataaaggtgcttcagctcaatcatttattgaacgcatgacaaactttgataaaaatcttccaaatgaaaaagtactaccaaaacatagtttgctttatgagtattttacggtttataacgaattgacaaaggtcaaatatgttactgaaggaatgcgaaaaccagcatttctttcaggtgaacagaagaaagccattgttgatttactcttcaaaacaaatcgaaaagtaaccgttaagcaattaaaagaagattatttcaaaaaaatagaatgttttgatagtgttgaaatttcaggagttgaagatagatttaatgcttcattaggtacctaccatgatttgctaaaaattattaaagataaagattttttggataatgaagaaaatgaagatatcttagaggatattgttttaacattgaccttatttgaagatagggagatgattgaggaaagacttaaaacatatgctcacctctttgatgataaggtgatgaaacagcttaaacgtcgccgttatactggttggggacgtttgtctcgaaaattgattaatggtattagggataagcaatctggcaaaacaatattagattttttgaaatcagatggttttgccaatcgcaattttatgcagctgatccatgatgatagtttgacatttaaagaagacattcaaaaagcacaagtgtctggacaaggcgatagtttacatgaacatattgcaaatttagctggtagccctgctattaaaaaaggtattttacagactgtaaaagttgttgatgaattggtcaaagtaatggggcggcataagccagaaaatatcgttattgaaatggcacgtgaaaatcagacaactcaaaagggccagaaaaattcgcgagagcgtatgaaacgaatcgaagaaggtatcaaagaattaggaagtcagattcttaaagagcatcctgttgaaaatactcaattgcaaaatgaaaagctctatctctattatctccaaaatggaagagacatgtatgtggaccaagaattagatattaatcgtttaagtgattatgatgtcgatcacattgttccacaaagtttccttaaagacgattcaatagacaataaggtcttaacgcgttctgataaaaatcgtggtaaatcggataacgttccaagtgaagaagtagtcaaaaagatgaaaaactattggagacaacttctaaacgccaagttaatcactcaacgtaagtttgataatttaacgaaagctgaacgtggaggtttgagtgaacttgataaagctggttttatcaaacgccaattggttgaaactcgccaaatcactaagcatgtggcacaaattttggatagtcgcatgaatactaaatacgatgaaaatgataaacttattcgagaggttaaagtgattaccttaaaatctaaattagtttctgacttccgaaaagatttccaattctataaagtacgtgagattaacaattaccatcatgcccatgatgcgtatctaaatgccgtcgttggaactgctttgattaagaaatatccaaaacttgaatcggagtttgtctatggtgattataaagtttatgatgttcgtaaaatgattgctaagtctgagcaagaaataggcaaagcaaccgcaaaatatttcttttactctaatatcatgaacttcttcaaaacagaaattacacttgcaaatggagagattcgcaaacgccctctaatcgaaactaatggggaaactggagaaattgtctgggataaagggcgagattttgccacagtgcgcaaagtattgtccatgccccaagtcaatattgtcaagaaaacagaagtacagacaggcggattctccaaggagtcaattttaccaaaaagaaattcggacaagcttattgctcgtaaaaaagactgggatccaaaaaaatatggtggttttgatagtccaacggtagcttattcagtcctagtggttgctaaggtggaaaaagggaaatcgaagaagttaaaatccgttaaagagttactagggatcacaattatggaaagaagttcctttgaaaaaaatccgattgactttttagaagctaaaggatataaggaagttaaaaaagacttaatcattaaactacctaaatatagtctttttgagttagaaaacggtcgtaaacggatgctggctagtgccggagaattacaaaaaggaaatgagctggctctgccaagcaaatatgtgaattttttatatttagctagtcattatgaaaagttgaagggtagtccagaagataacgaacaaaaacaattgtttgtggagcagcataagcattatttagatgagattattgagcaaatcagtgaattttctaagcgtgttattttagcagatgccaatttagataaagttcttagtgcatataacaaacatagagacaaaccaatacgtgaacaagcagaaaatattattcatttatttacgttgacgaatcttggagctcccgctgcttttaaatattttgatacaacaattgatcgtaaacgatatacgtctacaaaagaagttttagatgccactcttatccatcaatccatcactggtctttatgaaacacgcattgatttgagtcagctaggaggtgactga

SEQ ID NO: 203 - protein, 1368 aa, synthetic construct
  REGION 1..1368: note = catalytically inactive Cas9 (dCas9)polypeptide sequence
  REGION 5..58: note = MISC_FEATURE - RuvC domain
  REGION 718..764: note = MISC_FEATURE - RuvC domain
  REGION 773..902: note = MISC_FEATURE - HNH domain
  REGION 907..1102: note = MISC_FEATURE - RuvC domain
MDKKYSIGLAIGTNSVGWAVITDEYKVPSKKFKVLGNTDRHSIKKNLIGALLFDSGETAEATRLKRTARRRYTRRKNRICYLQEIFSNEMAKVDDSFFHRLEESFLVEEDKKHERHPIFGNIVDEVAYHEKYPTIYHLRKKLVDSTDKADLRLIYLALAHMIKFRGHFLIEGDLNPDNSDVDKLFIQLVQTYNQLFEENPINASGVDAKAILSARLSKSRRLENLIAQLPGEKKNGLFGNLIALSLGLTPNFKSNFDLAEDAKLQLSKDTYDDDLDNLLAQIGDQYADLFLAAKNLSDAILLSDILRVNTEITKAPLSASMIKRYDEHHQDLTLLKALVRQQLPEKYKEIFFDQSKNGYAGYIDGGASQEEFYKFIKPILEKMDGTEELLVKLNREDLLRKQRTFDNGSIPHQIHLGELHAILRRQEDFYPFLKDNREKIEKILTFRIPYYVGPLARGNSRFAWMTRKSEETITPWNFEEVVDKGASAQSFIERMTNFDKNLPNEKVLPKHSLLYEYFTVYNELTKVKYVTEGMRKPAFLSGEQKKAIVDLLFKTNRKVTVKQLKEDYFKKIECFDSVEISGVEDRFNASLGTYHDLLKIIKDKDFLDNEENEDILEDIVLTLTLFEDREMIEERLKTYAHLFDDKVMKQLKRRRYTGWGRLSRKLINGIRDKQSGKTILDFLKSDGFANRNFMQLIHDDSLTFKEDIQKAQVSGQGDSLHEHIANLAGSPAIKKGILQTVKVVDELVKVMGRHKPENIVIEMARENQTTQKGQKNSRERMKRIEEGIKELGSQILKEHPVENTQLQNEKLYLYYLQNGRDMYVDQELDINRLSDYDVDAIVPQSFLKDDSIDNKVLTRSDKNRGKSDNVPSEEVVKKMKNYWRQLLNAKLITQRKFDNLTKAERGGLSELDKAGFIKRQLVETRQITKHVAQILDSRMNTKYDENDKLIREVKVITLKSKLVSDFRKDFQFYKVREINNYHHAHDAYLNAVVGTALIKKYPKLESEFVYGDYKVYDVRKMIAKSEQEIGKATAKYFFYSNIMNFFKTEITLANGEIRKRPLIETNGETGEIVWDKGRDFATVRKVLSMPQVNIVKKTEVQTGGFSKESILPKRNSDKLIARKKDWDPKKYGGFDSPTVAYSVLVVAKVEKGKSKKLKSVKELLGITIMERSSFEKNPIDFLEAKGYKEVKKDLIIKLPKYSLFELENGRKRMLASAGELQKGNELALPSKYVNFLYLASHYEKLKGSPEDNEQKQLFVEQHKHYLDEIIEQISEFSKRVILADANLDKVLSAYNKHRDKPIREQAENIIHLFTLTNLGAPAAFKYFDTTIDRKRYTSTKEVLDATLIHQSITGLYETRIDLSQLGGD

SEQ ID NO: 204 - protein, 345 aa, Sulfolobus islandicus
  REGION 1..345: note = MISC_FEATURE - tr|F0NN87|F0NN87_SULIHCRISPR-associatedCasx protein OS =Sulfolobus islandicus (strain HVE10/4) GN = SiH_0402 PE=4; SV = 1);CasX polypeptide sequence
MEVPLYNIFGDNYIIQVATEAENSTIYNNKVEIDDEELRNVLNLAYKIAKNNEDAAAERRGKAKKKKGEEGETTTSNIILPLSGNDKNPWTETLKCYNFPTTVALSEVFKNFSQVKECEEVSAPSFVKPEFYEFGRSPGMVERTRRVKLEVEPHYLIIAAAGWVLTRLGKAKVSEGDYVGVNVFTPTRGILYSLIQNVNGIVPGIKPETAFGLWIARKVVSSVTNPNVSVVRIYTISDAVGQNPTTINGGFSIDLTKLLEKRYLLSERLEAIARNALSISSNMRERYIVLANYIYEYLTGSKRLEDLLYFANRDLIMNLNSDDGKVRDLKLISAYVNGELIRGEG

SEQ ID NO: 205 - protein, 345 aa, Sulfolobus islandicus
  REGION 1..345: note = MISC_FEATURE - tr|F0NH53|F0NH53_SULIR CRISPR associated protein, Casx OS =Sulfolobus islandicus (strain REY15A) GN=SiRe_0771 PE=4 SV=1);CasX polypeptide sequence
MEVPLYNIFGDNYIIQVATEAENSTIYNNKVEIDDEELRNVLNLAYKIAKNNEDAAAERRGKAKKKKGEEGETTTSNIILPLSGNDKNPWTETLKCYNFPTTVALSEVFKNFSQVKECEEVSAPSFVKPEFYKFGRSPGMVERTRRVKLEVEPHYLIMAAAGWVLTRLGKAKVSEGDYVGVNVFTPTRGILYSLIQNVNGIVPGIKPETAFGLWIARKVVSSVTNPNVSVVSIYTISDAVGQNPTTINGGFSIDLTKLLEKRDLLSERLEAIARNALSISSNMRERYIVLANYIYEYLTGSKRLEDLLYFANRDLIMNLNSDDGKVRDLKLISAYVNGELIRGEG

SEQ ID NO: 206 - protein, 987 aa, unidentified
  REGION 1..987: note = MISC_FEATURE - CasX polypeptide sequence
MEKRINKIRKKLSADNATKPVSRSGPMKTLLVRVMTDDLKKRLEKRRKKPEVMPQVISNNAANNLRMLLDDYTKMKEAILQVYWQEFKDDHVGLMCKFAQPASKKIDQNKLKPEMDEKGNLTTAGFACSQCGQPLFVYKLEQVSEKGKAYTNYFGRCNVAEHEKLILLAQLKPVKDSDEAVTYSLGKFGQRALDFYSIHVTKESTHPVKPLAQIAGNRYASGPVGKALSDACMGTIASFLSKYQDIIIEHQKVVKGNQKRLESLRELAGKENLEYPSVTLPPQPHTKEGVDFAYNEVIARVRMWVNLNLWQKLKLSRDDAKPLLRLKGFPSFPVVERRENEVDWWNTINEVKKLIDAKRDMGRVFWSGVTAEKRNTILEGYNYLPNENDHKKREGSLENPKKPAKRQFGDLLLYLEKKYAGDWGKVFDEAWERIDKKIAGLTSHIEREEARNAEDAQSKAVLTDWLRAKASFVLERLKEMDEKEFYACEIQLQKWYGDLRGNPFAVEAENRVVDISGFSIGSDGHSIQYRNLLAWKYLENGKREFYLLMNYGKKGRIRFTDGTDIKKSGKWQGLLYGGGKAKVIDLTFDPDDEQLIILPLAFGTRQGREFIWNDLLSLETGLIKLANGRVIEKTIYNKKIGRDEPALFVALTFERREVVDPSNIKPVNLIGVARGENIPAVIALTDPEGCPLPEFKDSSGGPTDILRIGEGYKEKQRAIQAAKEVEQRRAGGYSRKFASKSRNLADDMVRNSARDLFYHAVTHDAVLVFANLSRGFGRQGKRTFMTERQYTKMEDWLTAKLAYEGLTSKTYLSKTLAQYTSKTCSNCGFTITYADMDVMLVRLKKTSDGWATTLNNKELKAEYQITYYNRYKRQTVEKELSAELDRLSEESGNNDISKWTKGRRDEALFLLKKRFSHRPVQEQFVCLDCGHEVHAAEQAALNIARSWLFLNSNSTEFKSYKSGKQPFVGAWQAFYKRRLKEVWKPNA

SEQ ID NO: 207 - protein, 1210 aa, unidentified
  REGION 1..1210: note = MISC_FEATURE - APG80656.1 CRISPR-associated protein CasY [uncultured Parcubacteria group bacterium]; CasY polypeptide sequence
MSKRHPRISGVKGYRLHAQRLEYTGKSGAMRTIKYPLYSSPSGGRTVPREIVSAINDDYVGLYGLSNFDDLYNAEKRNEEKVYSVLDFWYDCVQYGAVFSYTAPGLLKNVAEVRGGSYELTKTLKGSHLYDELQIDKVIKFLNKKEISRANGSLDKLKKDIIDCFKAEYRERHKDQCNKLADDIKNAKKDAGASLGERQKKLFRDFFGISEQSENDKPSFTNPLNLTCCLLPFDTVNNNRNRGEVLFNKLKEYAQKLDKNEGSLEMWEYIGIGNSGTAFSNFLGEGFLGRLRENKITELKKAMMDITDAWRGQEQEEELEKRLRILAALTIKLREPKFDNHWGGYRSDINGKLSSWLQNYINQTVKIKEDLKGHKKDLKKAKEMINRFGESDTKEEAVVSSLLESIEKIVPDDSADDEKPDIPAIAIYRRFLSDGRLTLNRFVQREDVQEALIKERLEAEKKKKPKKRKKKSDAEDEKETIDFKELFPHLAKPLKLVPNFYGDSKRELYKKYKNAAIYTDALWKAVEKIYKSAFSSSLKNSFFDTDFDKDFFIKRLQKIFSVYRRFNTDKWKPIVKNSFAPYCDIVSLAENEVLYKPKQSRSRKSAAIDKNRVRLPSTENIAKAGIALARELSVAGFDWKDLLKKEEHEEYIDLIELHKTALALLLAVTETQLDISALDFVENGTVKDFMKTRDGNLVLEGRFLEMFSQSIVFSELRGLAGLMSRKEFITRSAIQTMNGKQAELLYIPHEFQSAKITTPKEMSRAFLDLAPAEFATSLEPESLSEKSLLKLKQMRYYPHYFGYELTRTGQGIDGGVAENALRLEKSPVKKREIKCKQYKTLGRGQNKIVLYVRSSYYQTQFLEWFLHRPKNVQTDVAVSGSFLIDEKKVKTRWNYDALTVALEPVSGSERVFVSQPFTIFPEKSAEEEGQRYLGIDIGEYGIAYTALEITGDSAKILDQNFISDPQLKTLREEVKGLKLDQRRGTFAMPSTKIARIRESLVHSLRNRIHHLALKHKAKIVYELEVSRFEEGKQKIKKVYATLKKADVYSEIDADKNLQTTVWGKLAVASEISASYTSQFCGACKKLWRAEMQVDETITTQELIGTVRVIKGGTLIDAIKDFMRPPIFDENDTPFPKYRDFCDKHHISKKMRGNSCLFICPFCRANADADIQASQTIALLRYVKEEKKVEDYFERFRKLKNIKVLGQMKKI

SEQ ID NO: 208 - protein, 1082 aa, Neisseria meningitidis
  REGION 1..1082: note = MISC_FEATURE - NCBI Reference: WP_002235162.1; type II CRISPR RNA-guided endonuclease Cas9; Nme1Cas9 polypeptide sequence
MAAFKPNPINYILGLDIGIASVGWAMVEIDEDENPICLIDLGVRVFERAEVPKTGDSLAMARRLARSVRRLTRRRAHRLLRARRLLKREGVLQAADFDENGLIKSLPNTPWQLRAAALDRKLTPLEWSAVLLHLIKHRGYLSQRKNEGETADKELGALLKGVADNAHALQTGDFRTPAELALNKFEKESGHIRNQRGDYSHTFSRKDLQAELILLFEKQKEFGNPHVSGGLKEGIETLLMTQRPALSGDAVQKMLGHCTFEPAEPKAAKNTYTAERFIWLTKLNNLRILEQGSERPLTDTERATLMDEPYRKSKLTYAQARKLLGLEDTAFFKGLRYGKDNAEASTLMEMKAYHAISRALEKEGLKDKKSPLNLSPELQDEIGTAFSLFKTDEDITGRLKDRIQPEILEALLKHISFDKFVQISLKALRRIVPLMEQGKRYDEACAEIYGDHYGKKNTEEKIYLPPIPADEIRNPVVLRALSQARKVINGVVRRYGSPARIHIETAREVGKSFKDRKEIEKRQEENRKDREKAAAKFREYFPNFVGEPKSKDILKLRLYEQQHGKCLYSGKEINLGRLNEKGYVEIDHALPFSRTWDDSFNNKVLVLGSENQNKGNQTPYEYFNGKDNSREWQEFKARVETSRFPRSKKQRILLQKFDEDGFKERNLNDTRYVNRFLCQFVADRMRLTGKGKKRVFASNGQITNLLRGFWGLRKVRAENDRHHALDAVVVACSTVAMQQKITRFVRYKEMNAFDGKTIDKETGEVLHQKTHFPQPWEFFAQEVMIRVFGKPDGKPEFEEADTPEKLRTLLAEKLSSRPEAVHEYVTPLFVSRAPNRKMSGQGHMETVKSAKRLDEGVSVLRVPLTQLKLKDLEKMVNREREPKLYEALKARLEAHKDDPAKAFAEPFYKYDKAGNRTQQVKAVRVEQVQKTGVWVRNHNGIADNATMVRVDVFEKGDKYYLVPIYSWQVAKGILPDRAVVQGKDEEDWQLIDDSFNFKFSLHPNDLVEVITKKARMFGYFASCHRGTGNINIRIHDLDHKIGKNGILEGIGVKTALSFQKYQIDELGKEIRPCRLKKRPPVR

SEQ ID NO: 209 - protein, 1082 aa, Neisseria meningitidis
  REGION 1..1082: note = MISC_FEATURE - NCBI Reference: WP_002230835; type II CRISPR RNA-guided endonuclease Cas9; Nme2Cas9 polypeptide sequence
MAAFKPNPINYILGLDIGIASVGWAMVEIDEEENPIRLIDLGVRVFERAEVPKTGDSLAMARRLARSVRRLTRRRAHRLLRARRLLKREGVLQAADFDENGLIKSLPNTPWQLRAAALDRKLTPLEWSAVLLHLIKHRGYLSQRKNEGETADKELGALLKGVANNAHALQTGDFRTPAELALNKFEKESGHIRNQRGDYSHTFSRKDLQAELILLFEKQKEFGNPHVSGGLKEGIETLLMTQRPALSGDAVQKMLGHCTFEPAEPKAAKNTYTAERFIWLTKLNNLRILEQGSERPLTDTERATLMDEPYRKSKLTYAQARKLLGLEDTAFFKGLRYGKDNAEASTLMEMKAYHAISRALEKEGLKDKKSPLNLSSELQDEIGTAFSLFKTDEDITGRLKDRVQPEILEALLKHISFDKFVQISLKALRRIVPLMEQGKRYDEACAEIYGDHYGKKNTEEKIYLPPIPADEIRNPVVLRALSQARKVINGVVRRYGSPARIHIETAREVGKSFKDRKEIEKRQEENRKDREKAAAKFREYFPNFVGEPKSKDILKLRLYEQQHGKCLYSGKEINLVRLNEKGYVEIDHALPFSRTWDDSFNNKVLVLGSENQNKGNQTPYEYFNGKDNSREWQEFKARVETSRFPRSKKQRILLQKFDEDGFKECNLNDTRYVNRFLCQFVADHILLTGKGKRRVFASNGQITNLLRGFWGLRKVRAENDRHHALDAVVVACSTVAMQQKITRFVRYKEMNAFDGKTIDKETGKVLHQKTHFPQPWEFFAQEVMIRVFGKPDGKPEFEEADTPEKLRTLLAEKLSSRPEAVHEYVTPLFVSRAPNRKMSGAHKDTLRSAKRFVKHNEKISVKRVWLTEIKLADLENMVNYKNGREIELYEALKARLEAYGGNAKQAFDPKDNPFYKKGGQLVKAVRVEKTQESGVLLNKKNAYTIADNGDMVRVDVFCKVDKKGKNQYFIVPIYAWQVAENILPDIDCKGYRIDDSYTFCFSLHKYDLIAFQKDEKSKVEFAYYINCDSSNGRFYLAWHDKGSKEQQFRISTQNLVLIQKYQVNELGKEIRPCRLKKRPPVR

SEQ ID NO: 210 - protein, 1300 aa, Francisella tularensis
  REGION 1..1300: note = MISC_FEATURE - wild type Cpf1 polypeptide sequence
  source 1..1300: note = subspecies novicida
MSIYQEFVNKYSLSKTLRFELIPQGKTLENIKARGLILDDEKRAKDYKKAKQIIDKYHQFFIEEILSSVCISEDLLQNYSDVYFKLKKSDDDNLQKDFKSAKDTIKKQISEYIKDSEKFKNLFNQNLIDAKKGQESDLILWLKQSKDNGIELFKANSDITDIDEALEIIKSFKGWTTYFKGFHENRKNVYSSNDIPTSIIYRIVDDNLPKFLENKAKYESLKDKAPEAINYEQIKKDLAEELTFDIDYKTSEVNQRVFSLDEVFEIANFNNYLNQSGITKFNTIIGGKFVNGENTKRKGINEYINLYSQQINDKTLKKYKMSVLFKQILSDTESKSFVIDKLEDDSDVVTTMQSFYEQIAAFKTVEEKSIKETLSLLFDDLKAQKLDLSKIYFKNDKSLTDLSQQVFDDYSVIGTAVLEYITQQIAPKNLDNPSKKEQELIAKKTEKAKYLSLETIKLALEEFNKHRDIDKQCRFEEILANFAAIPMIFDEIAQNKDNLAQISIKYQNQGKKDLLQASAEDDVKAIKDLLDQTNNLLHKLKIFHISQSEDKANILDKDEHFYLVFEECYFELANIVPLYNKIRNYITQKPYSDEKFKLNFENSTLANGWDKNKEPDNTAILFIKDDKYYLGVMNKKNNKIFDDKAIKENKGEGYKKIVYKLLPGANKMLPKVFFSAKSIKFYNPSEDILRIRNHSTHTKNGSPQKGYEKFEFNIEDCRKFIDFYKQSISKHPEWKDFGFRFSDTQRYNSIDEFYREVENQGYKLTFENISESYIDSVVNQGKLYLFQIYNKDFSAYSKGRPNLHTLYWKALFDERNLQDVVYKLNGEAELFYRKQSIPKKITHPAKEAIANKNKDNPKKESVFEYDLIKDKRFTEDKFFFHCPITINFKSSGANKFNDEINLLLKEKANDVHILSIDRGERHLAYYTLVDGKGNIIKQDTFNIIGNDRMKTNYHDKLAAIEKDRDSARKDWKKINNIKEMKEGYLSQVVHEIAKLVIEYNAIVVFEDLNFGFKRGRFKVEKQVYQKLEKMLIEKLNYLVFKDNEFDKTGGVLRAYQLTAPFETFKKMGKQTGIIYYVPAGFTSKICPVTGFVNQLYPKYESVSKSQEFFSKFDKICYNLDKGYFEFSFDYKNFGDKAAKGKWTIASFGSRLINFRNSDKNHNWDTREVYPTKELEKLLKDYSIEYGHGECIKAAICGESDKKFFAKLTSVLNTILQMRNSKTGTELDYLISPVADVNGNFFDSRQAPKNMPQDADANGAYHIGLKGLMLLGRIKNNQEGKKLNLVIKNEEYFEFVQNRNN

SEQ ID NO: 211 - protein, 1300 aa, Francisella tularensis
  REGION 1..1300: note = MISC_FEATURE - Cpf1 D917A polypeptide sequence
  source 1..1300: note = subspecies novicida
MSIYQEFVNKYSLSKTLRFELIPQGKTLENIKARGLILDDEKRAKDYKKAKQIIDKYHQFFIEEILSSVCISEDLLQNYSDVYFKLKKSDDDNLQKDFKSAKDTIKKQISEYIKDSEKFKNLFNQNLIDAKKGQESDLILWLKQSKDNGIELFKANSDITDIDEALEIIKSFKGWTTYFKGFHENRKNVYSSNDIPTSIIYRIVDDNLPKFLENKAKYESLKDKAPEAINYEQIKKDLAEELTFDIDYKTSEVNQRVFSLDEVFEIANFNNYLNQSGITKFNTIIGGKFVNGENTKRKGINEYINLYSQQINDKTLKKYKMSVLFKQILSDTESKSFVIDKLEDDSDVVTTMQSFYEQIAAFKTVEEKSIKETLSLLFDDLKAQKLDLSKIYFKNDKSLTDLSQQVFDDYSVIGTAVLEYITQQIAPKNLDNPSKKEQELIAKKTEKAKYLSLETIKLALEEFNKHRDIDKQCRFEEILANFAAIPMIFDEIAQNKDNLAQISIKYQNQGKKDLLQASAEDDVKAIKDLLDQTNNLLHKLKIFHISQSEDKANILDKDEHFYLVFEECYFELANIVPLYNKIRNYITQKPYSDEKFKLNFENSTLANGWDKNKEPDNTAILFIKDDKYYLGVMNKKNNKIFDDKAIKENKGEGYKKIVYKLLPGANKMLPKVFFSAKSIKFYNPSEDILRIRNHSTHTKNGSPQKGYEKFEFNIEDCRKFIDFYKQSISKHPEWKDFGFRFSDTQRYNSIDEFYREVENQGYKLTFENISESYIDSVVNQGKLYLFQIYNKDFSAYSKGRPNLHTLYWKALFDERNLQDVVYKLNGEAELFYRKQSIPKKITHPAKEAIANKNKDNPKKESVFEYDLIKDKRFTEDKFFFHCPITINFKSSGANKFNDEINLLLKEKANDVHILSIARGERHLAYYTLVDGKGNIIKQDTFNIIGNDRMKTNYHDKLAAIEKDRDSARKDWKKINNIKEMKEGYLSQVVHEIAKLVIEYNAIVVFEDLNFGFKRGRFKVEKQVYQKLEKMLIEKLNYLVFKDNEFDKTGGVLRAYQLTAPFETFKKMGKQTGIIYYVPAGFTSKICPVTGFVNQLYPKYESVSKSQEFFSKFDKICYNLDKGYFEFSFDYKNFGDKAAKGKWTIASFGSRLINFRNSDKNHNWDTREVYPTKELEKLLKDYSIEYGHGECIKAAICGESDKKFFAKLTSVLNTILQMRNSKTGTELDYLISPVADVNGNFFDSRQAPKNMPQDADANGAYHIGLKGLMLLGRIKNNQEGKKLNLVIKNEEYFEFVQNRNN

SEQ ID NO: 212 - protein, 1300 aa, Francisella tularensis
  REGION 1..1300: note = MISC_FEATURE - Cpf1 E1006A polypeptide sequence
  source 1..1300: note = subspecies novicida
MSIYQEFVNKYSLSKTLRFELIPQGKTLENIKARGLILDDEKRAKDYKKAKQIIDKYHQFFIEEILSSVCISEDLLQNYSDVYFKLKKSDDDNLQKDFKSAKDTIKKQISEYIKDSEKFKNLFNQNLIDAKKGQESDLILWLKQSKDNGIELFKANSDITDIDEALEIIKSFKGWTTYFKGFHENRKNVYSSNDIPTSIIYRIVDDNLPKFLENKAKYESLKDKAPEAINYEQIKKDLAEELTFDIDYKTSEVNQRVFSLDEVFEIANFNNYLNQSGITKFNTIIGGKFVNGENTKRKGINEYINLYSQQINDKTLKKYKMSVLFKQILSDTESKSFVIDKLEDDSDVVTTMQSFYEQIAAFKTVEEKSIKETLSLLFDDLKAQKLDLSKIYFKNDKSLTDLSQQVFDDYSVIGTAVLEYITQQIAPKNLDNPSKKEQELIAKKTEKAKYLSLETIKLALEEFNKHRDIDKQCRFEEILANFAAIPMIFDEIAQNKDNLAQISIKYQNQGKKDLLQASAEDDVKAIKDLLDQTNNLLHKLKIFHISQSEDKANILDKDEHFYLVFEECYFELANIVPLYNKIRNYITQKPYSDEKFKLNFENSTLANGWDKNKEPDNTAILFIKDDKYYLGVMNKKNNKIFDDKAIKENKGEGYKKIVYKLLPGANKMLPKVFFSAKSIKFYNPSEDILRIRNHSTHTKNGSPQKGYEKFEFNIEDCRKFIDFYKQSISKHPEWKDFGFRFSDTQRYNSIDEFYREVENQGYKLTFENISESYIDSVVNQGKLYLFQIYNKDFSAYSKGRPNLHTLYWKALFDERNLQDVVYKLNGEAELFYRKQSIPKKITHPAKEAIANKNKDNPKKESVFEYDLIKDKRFTEDKFFFHCPITINFKSSGANKFNDEINLLLKEKANDVHILSIDRGERHLAYYTLVDGKGNIIKQDTFNIIGNDRMKTNYHDKLAAIEKDRDSARKDWKKINNIKEMKEGYLSQVVHEIAKLVIEYNAIVVFADLNFGFKRGRFKVEKQVYQKLEKMLIEKLNYLVFKDNEFDKTGGVLRAYQLTAPFETFKKMGKQTGIIYYVPAGFTSKICPVTGFVNQLYPKYESVSKSQEFFSKFDKICYNLDKGYFEFSFDYKNFGDKAAKGKWTIASFGSRLINFRNSDKNHNWDTREVYPTKELEKLLKDYSIEYGHGECIKAAICGESDKKFFAKLTSVLNTILQMRNSKTGTELDYLISPVADVNGNFFDSRQAPKNMPQDADANGAYHIGLKGLMLLGRIKNNQEGKKLNLVIKNEEYFEFVQNRNN

SEQ ID NO: 213 - protein, 1300 aa, Francisella tularensis
  REGION 1..1300: note = MISC_FEATURE - Cpf1 D1255A polypeptide sequence
  source 1..1300: note = subspecies novicida
MSIYQEFVNKYSLSKTLRFELIPQGKTLENIKARGLILDDEKRAKDYKKAKQIIDKYHQFFIEEILSSVCISEDLLQNYSDVYFKLKKSDDDNLQKDFKSAKDTIKKQISEYIKDSEKFKNLFNQNLIDAKKGQESDLILWLKQSKDNGIELFKANSDITDIDEALEIIKSFKGWTTYFKGFHENRKNVYSSNDIPTSIIYRIVDDNLPKFLENKAKYESLKDKAPEAINYEQIKKDLAEELTFDIDYKTSEVNQRVFSLDEVFEIANFNNYLNQSGITKFNTIIGGKFVNGENTKRKGINEYINLYSQQINDKTLKKYKMSVLFKQILSDTESKSFVIDKLEDDSDVVTTMQSFYEQIAAFKTVEEKSIKETLSLLFDDLKAQKLDLSKIYFKNDKSLTDLSQQVFDDYSVIGTAVLEYITQQIAPKNLDNPSKKEQELIAKKTEKAKYLSLETIKLALEEFNKHRDIDKQCRFEEILANFAAIPMIFDEIAQNKDNLAQISIKYQNQGKKDLLQASAEDDVKAIKDLLDQTNNLLHKLKIFHISQSEDKANILDKDEHFYLVFEECYFELANIVPLYNKIRNYITQKPYSDEKFKLNFENSTLANGWDKNKEPDNTAILFIKDDKYYLGVMNKKNNKIFDDKAIKENKGEGYKKIVYKLLPGANKMLPKVFFSAKSIKFYNPSEDILRIRNHSTHTKNGSPQKGYEKFEFNIEDCRKFIDFYKQSISKHPEWKDFGFRFSDTQRYNSIDEFYREVENQGYKLTFENISESYIDSVVNQGKLYLFQIYNKDFSAYSKGRPNLHTLYWKALFDERNLQDVVYKLNGEAELFYRKQSIPKKITHPAKEAIANKNKDNPKKESVFEYDLIKDKRFTEDKFFFHCPITINFKSSGANKFNDEINLLLKEKANDVHILSIDRGERHLAYYTLVDGKGNIIKQDTFNIIGNDRMKTNYHDKLAAIEKDRDSARKDWKKINNIKEMKEGYLSQVVHEIAKLVIEYNAIVVFEDLNFGFKRGRFKVEKQVYQKLEKMLIEKLNYLVFKDNEFDKTGGVLRAYQLTAPFETFKKMGKQTGIIYYVPAGFTSKICPVTGFVNQLYPKYESVSKSQEFFSKFDKICYNLDKGYFEFSFDYKNFGDKAAKGKWTIASFGSRLINFRNSDKNHNWDTREVYPTKELEKLLKDYSIEYGHGECIKAAICGESDKKFFAKLTSVLNTILQMRNSKTGTELDYLISPVADVNGNFFDSRQAPKNMPQDAAANGAYHIGLKGLMLLGRIKNNQEGKKLNLVIKNEEYFEFVQNRNN

SEQ ID NO: 214 - protein, 1300 aa, Francisella tularensis
  REGION 1..1300: note = MISC_FEATURE - Cpf1 D917A/E1006A polypeptide sequence
  source 1..1300: note = subspecies novicida
MSIYQEFVNKYSLSKTLRFELIPQGKTLENIKARGLILDDEKRAKDYKKAKQIIDKYHQFFIEEILSSVCISEDLLQNYSDVYFKLKKSDDDNLQKDFKSAKDTIKKQISEYIKDSEKFKNLFNQNLIDAKKGQESDLILWLKQSKDNGIELFKANSDITDIDEALEIIKSFKGWTTYFKGFHENRKNVYSSNDIPTSIIYRIVDDNLPKFLENKAKYESLKDKAPEAINYEQIKKDLAEELTFDIDYKTSEVNQRVFSLDEVFEIANFNNYLNQSGITKFNTIIGGKFVNGENTKRKGINEYINLYSQQINDKTLKKYKMSVLFKQILSDTESKSFVIDKLEDDSDVVTTMQSFYEQIAAFKTVEEKSIKETLSLLFDDLKAQKLDLSKIYFKNDKSLTDLSQQVFDDYSVIGTAVLEYITQQIAPKNLDNPSKKEQELIAKKTEKAKYLSLETIKLALEEFNKHRDIDKQCRFEEILANFAAIPMIFDEIAQNKDNLAQISIKYQNQGKKDLLQASAEDDVKAIKDLLDQTNNLLHKLKIFHISQSEDKANILDKDEHFYLVFEECYFELANIVPLYNKIRNYITQKPYSDEKFKLNFENSTLANGWDKNKEPDNTAILFIKDDKYYLGVMNKKNNKIFDDKAIKENKGEGYKKIVYKLLPGANKMLPKVFFSAKSIKFYNPSEDILRIRNHSTHTKNGSPQKGYEKFEFNIEDCRKFIDFYKQSISKHPEWKDFGFRFSDTQRYNSIDEFYREVENQGYKLTFENISESYIDSVVNQGKLYLFQIYNKDFSAYSKGRPNLHTLYWKALFDERNLQDVVYKLNGEAELFYRKQSIPKKITHPAKEAIANKNKDNPKKESVFEYDLIKDKRFTEDKFFFHCPITINFKSSGANKFNDEINLLLKEKANDVHILSIARGERHLAYYTLVDGKGNIIKQDTFNIIGNDRMKTNYHDKLAAIEKDRDSARKDWKKINNIKEMKEGYLSQVVHEIAKLVIEYNAIVVFADLNFGFKRGRFKVEKQVYQKLEKMLIEKLNYLVFKDNEFDKTGGVLRAYQLTAPFETFKKMGKQTGIIYYVPAGFTSKICPVTGFVNQLYPKYESVSKSQEFFSKFDKICYNLDKGYFEFSFDYKNFGDKAAKGKWTIASFGSRLINFRNSDKNHNWDTREVYPTKELEKLLKDYSIEYGHGECIKAAICGESDKKFFAKLTSVLNTILQMRNSKTGTELDYLISPVADVNGNFFDSRQAPKNMPQDADANGAYHIGLKGLMLLGRIKNNQEGKKLNLVIKNEEYFEFVQNRNN

SEQ ID NO: 215 - protein, 1300 aa, Francisella tularensis
  REGION 1..1300: note = MISC_FEATURE - Cpf1 D917A/D1255A polypeptide sequence
  source 1..1300: note = subspecies novicida
MSIYQEFVNKYSLSKTLRFELIPQGKTLENIKARGLILDDEKRAKDYKKAKQIIDKYHQFFIEEILSSVCISEDLLQNYSDVYFKLKKSDDDNLQKDFKSAKDTIKKQISEYIKDSEKFKNLFNQNLIDAKKGQESDLILWLKQSKDNGIELFKANSDITDIDEALEIIKSFKGWTTYFKGFHENRKNVYSSNDIPTSIIYRIVDDNLPKFLENKAKYESLKDKAPEAINYEQIKKDLAEELTFDIDYKTSEVNQRVFSLDEVFEIANFNNYLNQSGITKFNTIIGGKFVNGENTKRKGINEYINLYSQQINDKTLKKYKMSVLFKQILSDTESKSFVIDKLEDDSDVVTTMQSFYEQIAAFKTVEEKSIKETLSLLFDDLKAQKLDLSKIYFKNDKSLTDLSQQVFDDYSVIGTAVLEYITQQIAPKNLDNPSKKEQELIAKKTEKAKYLSLETIKLALEEFNKHRDIDKQCRFEEILANFAAIPMIFDEIAQNKDNLAQISIKYQNQGKKDLLQASAEDDVKAIKDLLDQTNNLLHKLKIFHISQSEDKANILDKDEHFYLVFEECYFELANIVPLYNKIRNYITQKPYSDEKFKLNFENSTLANGWDKNKEPDNTAILFIKDDKYYLGVMNKKNNKIFDDKAIKENKGEGYKKIVYKLLPGANKMLPKVFFSAKSIKFYNPSEDILRIRNHSTHTKNGSPQKGYEKFEFNIEDCRKFIDFYKQSISKHPEWKDFGFRFSDTQRYNSIDEFYREVENQGYKLTFENISESYIDSVVNQGKLYLFQIYNKDFSAYSKGRPNLHTLYWKALFDERNLQDVVYKLNGEAELFYRKQSIPKKITHPAKEAIANKNKDNPKKESVFEYDLIKDKRFTEDKFFFHCPITINFKSSGANKFNDEINLLLKEKANDVHILSIARGERHLAYYTLVDGKGNIIKQDTFNIIGNDRMKTNYHDKLAAIEKDRDSARKDWKKINNIKEMKEGYLSQVVHEIAKLVIEYNAIVVFEDLNFGFKRGRFKVEKQVYQKLEKMLIEKLNYLVFKDNEFDKTGGVLRAYQLTAPFETFKKMGKQTGIIYYVPAGFTSKICPVTGFVNQLYPKYESVSKSQEFFSKFDKICYNLDKGYFEFSFDYKNFGDKAAKGKWTIASFGSRLINFRNSDKNHNWDTREVYPTKELEKLLKDYSIEYGHGECIKAAICGESDKKFFAKLTSVLNTILQMRNSKTGTELDYLISPVADVNGNFFDSRQAPKNMPQDAAANGAYHIGLKGLMLLGRIKNNQEGKKLNLVIKNEEYFEFVQNRNN

SEQ ID NO: 216 - protein, 1300 aa, Francisella tularensis
  REGION 1..1300: note = MISC_FEATURE - Cpf1 E1006A/D1255A polypeptide sequence
  source 1..1300: note = subspecies novicida
MSIYQEFVNKYSLSKTLRFELIPQGKTLENIKARGLILDDEKRAKDYKKAKQIIDKYHQFFIEEILSSVCISEDLLQNYSDVYFKLKKSDDDNLQKDFKSAKDTIKKQISEYIKDSEKFKNLFNQNLIDAKKGQESDLILWLKQSKDNGIELFKANSDITDIDEALEIIKSFKGWTTYFKGFHENRKNVYSSNDIPTSIIYRIVDDNLPKFLENKAKYESLKDKAPEAINYEQIKKDLAEELTFDIDYKTSEVNQRVFSLDEVFEIANFNNYLNQSGITKFNTIIGGKFVNGENTKRKGINEYINLYSQQINDKTLKKYKMSVLFKQILSDTESKSFVIDKLEDDSDVVTTMQSFYEQIAAFKTVEEKSIKETLSLLFDDLKAQKLDLSKIYFKNDKSLTDLSQQVFDDYSVIGTAVLEYITQQIAPKNLDNPSKKEQELIAKKTEKAKYLSLETIKLALEEFNKHRDIDKQCRFEEILANFAAIPMIFDEIAQNKDNLAQISIKYQNQGKKDLLQASAEDDVKAIKDLLDQTNNLLHKLKIFHISQSEDKANILDKDEHFYLVFEECYFELANIVPLYNKIRNYITQKPYSDEKFKLNFENSTLANGWDKNKEPDNTAILFIKDDKYYLGVMNKKNNKIFDDKAIKENKGEGYKKIVYKLLPGANKMLPKVFFSAKSIKFYNPSEDILRIRNHSTHTKNGSPQKGYEKFEFNIEDCRKFIDFYKQSISKHPEWKDFGFRFSDTQRYNSIDEFYREVENQGYKLTFENISESYIDSVVNQGKLYLFQIYNKDFSAYSKGRPNLHTLYWKALFDERNLQDVVYKLNGEAELFYRKQSIPKKITHPAKEAIANKNKDNPKKESVFEYDLIKDKRFTEDKFFFHCPITINFKSSGANKFNDEINLLLKEKANDVHILSIDRGERHLAYYTLVDGKGNIIKQDTFNIIGNDRMKTNYHDKLAAIEKDRDSARKDWKKINNIKEMKEGYLSQVVHEIAKLVIEYNAIVVFADLNFGFKRGRFKVEKQVYQKLEKMLIEKLNYLVFKDNEFDKTGGVLRAYQLTAPFETFKKMGKQTGIIYYVPAGFTSKICPVTGFVNQLYPKYESVSKSQEFFSKFDKICYNLDKGYFEFSFDYKNFGDKAAKGKWTIASFGSRLINFRNSDKNHNWDTREVYPTKELEKLLKDYSIEYGHGECIKAAICGESDKKFFAKLTSVLNTILQMRNSKTGTELDYLISPVADVNGNFFDSRQAPKNMPQDAAANGAYHIGLKGLMLLGRIKNNQEGKKLNLVIKNEEYFEFVQNRNN

SEQ ID NO: 217 - protein, 1300 aa, Francisella tularensis
  REGION 1..1300: note = MISC_FEATURE - Cpf1 D917A/E1006A/D1255A polypeptide sequence
  source 1..1300: note = subspecies novicida
MSIYQEFVNKYSLSKTLRFELIPQGKTLENIKARGLILDDEKRAKDYKKAKQIIDKYHQFFIEEILSSVCISEDLLQNYSDVYFKLKKSDDDNLQKDFKSAKDTIKKQISEYIKDSEKFKNLFNQNLIDAKKGQESDLILWLKQSKDNGIELFKANSDITDIDEALEIIKSFKGWTTYFKGFHENRKNVYSSNDIPTSIIYRIVDDNLPKFLENKAKYESLKDKAPEAINYEQIKKDLAEELTFDIDYKTSEVNQRVFSLDEVFEIANFNNYLNQSGITKFNTIIGGKFVNGENTKRKGINEYINLYSQQINDKTLKKYKMSVLFKQILSDTESKSFVIDKLEDDSDVVTTMQSFYEQIAAFKTVEEKSIKETLSLLFDDLKAQKLDLSKIYFKNDKSLTDLSQQVFDDYSVIGTAVLEYITQQIAPKNLDNPSKKEQELIAKKTEKAKYLSLETIKLALEEFNKHRDIDKQCRFEEILANFAAIPMIFDEIAQNKDNLAQISIKYQNQGKKDLLQASAEDDVKAIKDLLDQTNNLLHKLKIFHISQSEDKANILDKDEHFYLVFEECYFELANIVPLYNKIRNYITQKPYSDEKFKLNFENSTLANGWDKNKEPDNTAILFIKDDKYYLGVMNKKNNKIFDDKAIKENKGEGYKKIVYKLLPGANKMLPKVFFSAKSIKFYNPSEDILRIRNHSTHTKNGSPQKGYEKFEFNIEDCRKFIDFYKQSISKHPEWKDFGFRFSDTQRYNSIDEFYREVENQGYKLTFENISESYIDSVVNQGKLYLFQIYNKDFSAYSKGRPNLHTLYWKALFDERNLQDVVYKLNGEAELFYRKQSIPKKITHPAKEAIANKNKDNPKKESVFEYDLIKDKRFTEDKFFFHCPITINFKSSGANKFNDEINLLLKEKANDVHILSIARGERHLAYYTLVDGKGNIIKQDTFNIIGNDRMKTNYHDKLAAIEKDRDSARKDWKKINNIKEMKEGYLSQVVHEIAKLVIEYNAIVVFADLNFGFKRGRFKVEKQVYQKLEKMLIEKLNYLVFKDNEFDKTGGVLRAYQLTAPFETFKKMGKQTGIIYYVPAGFTSKICPVTGFVNQLYPKYESVSKSQEFFSKFDKICYNLDKGYFEFSFDYKNFGDKAAKGKWTIASFGSRLINFRNSDKNHNWDTREVYPTKELEKLLKDYSIEYGHGECIKAAICGESDKKFFAKLTSVLNTILQMRNSKTGTELDYLISPVADVNGNFFDSRQAPKNMPQDAAANGAYHIGLKGLMLLGRIKNNQEGKKLNLVIKNEEYFEFVQNRNN

SEQ ID NO: 218 - protein, 1052 aa, Staphylococcus aureus
  REGION 1..1052: note = MISC_FEATURE - Exemplary SaCas9 polypeptide sequence
KRNYILGLDIGITSVGYGIIDYETRDVIDAGVRLFKEANVENNEGRRSKRGARRLKRRRRHRIQRVKKLLFDYNLLTDHSELSGINPYEARVKGLSQKLSEEEFSAALLHLAKRRGVHNVNEVEEDTGNELSTKEQISRNSKALEEKYVAELQLERLKKDGEVRGSINRFKTSDYVKEAKQLLKVQKAYHQLDQSFIDTYIDLLETRRTYYEGPGEGSPFGWKDIKEWYEMLMGHCTYFPEELRSVKYAYNADLYNALNDLNNLVITRDENEKLEYYEKFQIIENVFKQKKKPTLKQIAKEILVNEEDIKGYRVTSTGKPEFTNLKVYHDIKDITARKEIIENAELLDQIAKILTIYQSSEDIQEELTNLNSELTQEEIEQISNLKGYTGTHNLSLKAINLILDELWHTNDNQIAIFNRLKLVPKKVDLSQQKEIPTTLVDDFILSPVVKRSFIQSIKVINAIIKKYGLPNDIIIELAREKNSKDAQKMINEMQKRNRQTNERIEEIIRTTGKENAKYLIEKIKLHDMQEGKCLYSLEAIPLEDLLNNPFNYEVDHIIPRSVSFDNSFNNKVLVKQEENSKKGNRTPFQYLSSSDSKISYETFKKHILNLAKGKGRISKTKKEYLLEERDINRFSVQKDFINRNLVDTRYATRGLMNLLRSYFRVNNLDVKVKSINGGFTSFLRRKWKFKKERNKGYKHHAEDALIIANADFIFKEWKKLDKAKKVMENQMFEEKQAESMPEIETEQEYKEIFITPHQIKHIKDFKDYKYSHRVDKKPNRELINDTLYSTRKDDKGNTLIVNNLNGLYDKDNDKLKKLINKSPEKLLMYHHDPQTYQKLKLIMEQYGDEKNPLYKYYEETGNYLTKYSKKDNGPVIKKIKYYGNKLNAHLDITDDYPNSRNKVVKLSLKPYRFDVYLDNGVYKFVTVKNLDVIKKENYYEVNSKCYEEAKKLKKISNQAEFIASFYNNDLIKINGELYRVIGVNNDLLNRIEVNMIDITYREYLENMNDKRPPRIIKTIASKTQSIKKYSTDILGNLYEVKSKKHPQIIKKG

SEQ ID NO: 219 - protein, 1052 aa, Staphylococcus aureus
  REGION 1..1052: note = MISC_FEATURE - SaCas9n polypeptide sequence
KRNYILGLDIGITSVGYGIIDYETRDVIDAGVRLFKEANVENNEGRRSKRGARRLKRRRRHRIQRVKKLLFDYNLLTDHSELSGINPYEARVKGLSQKLSEEEFSAALLHLAKRRGVHNVNEVEEDTGNELSTKEQISRNSKALEEKYVAELQLERLKKDGEVRGSINRFKTSDYVKEAKQLLKVQKAYHQLDQSFIDTYIDLLETRRTYYEGPGEGSPFGWKDIKEWYEMLMGHCTYFPEELRSVKYAYNADLYNALNDLNNLVITRDENEKLEYYEKFQIIENVFKQKKKPTLKQIAKEILVNEEDIKGYRVTSTGKPEFTNLKVYHDIKDITARKEIIENAELLDQIAKILTIYQSSEDIQEELTNLNSELTQEEIEQISNLKGYTGTHNLSLKAINLILDELWHTNDNQIAIFNRLKLVPKKVDLSQQKEIPTTLVDDFILSPVVKRSFIQSIKVINAIIKKYGLPNDIIIELAREKNSKDAQKMINEMQKRNRQTNERIEEIIRTTGKENAKYLIEKIKLHDMQEGKCLYSLEAIPLEDLLNNPFNYEVDHIIPRSVSFDNSFNNKVLVKQEEASKKGNRTPFQYLSSSDSKISYETFKKHILNLAKGKGRISKTKKEYLLEERDINRFSVQKDFINRNLVDTRYATRGLMNLLRSYFRVNNLDVKVKSINGGFTSFLRRKWKFKKERNKGYKHHAEDALIIANADFIFKEWKKLDKAKKVMENQMFEEKQAESMPEIETEQEYKEIFITPHQIKHIKDFKDYKYSHRVDKKPNRELINDTLYSTRKDDKGNTLIVNNLNGLYDKDNDKLKKLINKSPEKLLMYHHDPQTYQKLKLIMEQYGDEKNPLYKYYEETGNYLTKYSKKDNGPVIKKIKYYGNKLNAHLDITDDYPNSRNKVVKLSLKPYRFDVYLDNGVYKFVTVKNLDVIKKENYYEVNSKCYEEAKKLKKISNQAEFIASFYNNDLIKINGELYRVIGVNNDLLNRIEVNMIDITYREYLENMNDKRPPRIIKTIASKTQSIKKYSTDILGNLYEVKSKKHPQIIKKG

SEQ ID NO: 220 - protein, 1052 aa, Staphylococcus aureus
  REGION 1..1052: note = MISC_FEATURE - SaKKH Cas9 polypeptide sequence
KRNYILGLDIGITSVGYGIIDYETRDVIDAGVRLFKEANVENNEGRRSKRGARRLKRRRRHRIQRVKKLLFDYNLLTDHSELSGINPYEARVKGLSQKLSEEEFSAALLHLAKRRGVHNVNEVEEDTGNELSTKEQISRNSKALEEKYVAELQLERLKKDGEVRGSINRFKTSDYVKEAKQLLKVQKAYHQLDQSFIDTYIDLLETRRTYYEGPGEGSPFGWKDIKEWYEMLMGHCTYFPEELRSVKYAYNADLYNALNDLNNLVITRDENEKLEYYEKFQIIENVFKQKKKPTLKQIAKEILVNEEDIKGYRVTSTGKPEFTNLKVYHDIKDITARKEIIENAELLDQIAKILTIYQSSEDIQEELTNLNSELTQEEIEQISNLKGYTGTHNLSLKAINLILDELWHTNDNQIAIFNRLKLVPKKVDLSQQKEIPTTLVDDFILSPVVKRSFIQSIKVINAIIKKYGLPNDIIIELAREKNSKDAQKMINEMQKRNRQTNERIEEIIRTTGKENAKYLIEKIKLHDMQEGKCLYSLEAIPLEDLLNNPFNYEVDHIIPRSVSFDNSFNNKVLVKQEEASKKGNRTPFQYLSSSDSKISYETFKKHILNLAKGKGRISKTKKEYLLEERDINRFSVQKDFINRNLVDTRYATRGLMNLLRSYFRVNNLDVKVKSINGGFTSFLRRKWKFKKERNKGYKHHAEDALIIANADFIFKEWKKLDKAKKVMENQMFEEKQAESMPEIETEQEYKEIFITPHQIKHIKDFKDYKYSHRVDKKPNRKLINDTLYSTRKDDKGNTLIVNNLNGLYDKDNDKLKKLINKSPEKLLMYHHDPQTYQKLKLIMEQYGDEKNPLYKYYEETGNYLTKYSKKDNGPVIKKIKYYGNKLNAHLDITDDYPNSRNKVVKLSLKPYRFDVYLDNGVYKFVTVKNLDVIKKENYYEVNSKCYEEAKKLKKISNQAEFIASFYKNDLIKINGELYRVIGVNNDLLNRIEVNMIDITYREYLENMNDKRPPHIIKTIASKTQSIKKYSTDILGNLYEVKSKKHPQIIKKG

SEQ ID NO: 221 - protein, 707 aa, synthetic construct
  REGION 1..707: note = Casphi-1 polypeptide sequence
MADTPTLFTQFLRHHLPGQRFRKDILKQAGRILANKGEDATIAFLRGKSEESPPDFQPPVKCPIIACSRPLTEWPIYQASVAIQGYVYGQSLAEFEASDPGCSKDGLLGWFDKTGVCTDYFSVQGLNLIFQNARKRYIGVQTKVTNRNEKRHKKLKRINAKRIAEGLPELTSDEPESALDETGHLIDPPGLNTNIYCYQQVSPKPLALSEVNQLPTAYAGYSTSGDDPIQPMVTKDRLSISKGQPGYIPEHQRALLSQKKHRRMRGYGLKARALLVIVRIQDDWAVIDLRSLLRNAYWRRIVQTKEPSTITKLLKLVTGDPVLDATRMVATFTYKPGIVQVRSAKCLKNKQGSKLFSERYLNETVSVTSIDLGSNNLVAVATYRLVNGNTPELLQRFTLPSHLVKDFERYKQAHDTLEDSIQKTAVASLPQGQQTEIRMWSMYGFREAQERVCQELGLADGSIPWNVMTATSTILTDLFLARGGDPKKCMFTSEPKKKKNSKQVLYKIRDRAWAKMYRTLLSKETREAWNKALWGLKRGSPDYARLSKRKEELARRCVNYTISTAEKRAQCGRTIVALEDLNIGFFHGRGKQEPGWVGLFTRKKENRWLMQALHKAFLELAHHRGYHVIEVNPAYTSQTCPVCRHCDPDNRDQHNREAFHCIGCGFRGNADLDVATHNIAMVAITGESLKRARGSVASKTPQPLAAE

SEQ ID NO: 222 - protein, 757 aa, synthetic construct
  REGION 1..757: note = Casphi-2 polypeptide sequence
MPKPAVESEFSKVLKKHFPGERFRSSYMKRGGKILAAQGEEAVVAYLQGKSEEEPPNFQPPAKCHVVTKSRDFAEWPIMKASEAIQRYIYALSTTERAACKPGKSSESHAAWFAATGVSNHGYSHVQGLNLIFDHTLGRYDGVLKKVQLRNEKARARLESINASRADEGLPEIKAEEEEVATNETGHLLQPPGINPSFYVYQTISPQAYRPRDEIVLPPEYAGYVRDPNAPIPLGVVRNRCDIQKGCPGYIPEWQREAGTAISPKTGKAVTVPGLSPKKNKRMRRYWRSEKEKAQDALLVTVRIGTDWVVIDVRGLLRNARWRTIAPKDISLNALLDLFTGDPVIDVRRNIVTFTYTLDACGTYARKWTLKGKQTKATLDKLTATQTVALVAIDLGQTNPISAGISRVTQENGALQCEPLDRFTLPDDLLKDISAYRIAWDRNEEELRARSVEALPEAQQAEVRALDGVSKETARTQLCADFGLDPKRLPWDKMSSNTTFISEALLSNSVSRDQVFFTPAPKKGAKKKAPVEVMRKDRTWARAYKPRLSVEAQKLKNEALWALKRTSPEYLKLSRRKEELCRRSINYVIEKTRRRTQCQIVIPVIEDLNVRFFHGSGKRLPGWDNFFTAKKENRWFIQGLHKAFSDLRTHRSFYVFEVRPERTSITCPKCGHCEVGNRDGEAFQCLSCGKTCNADLDVATHNLTQVALTGKTMPKREEPRDAQGTAPARKTKKASKSKAPPAEREDQTPAQEPSQTS

SEQ ID NO: 223 - protein, 766 aa, synthetic construct
  REGION 1..766: note = Casphi-3 polypeptide sequence
MEKEITELTKIRREFPNKKFSSTDMKKAGKLLKAEGPDAVRDFLNSCQEIIGDFKPPVKTNIVSISRPFEEWPVSMVGRAIQEYYFSLTKEELESVHPGTSSEDHKSFFNITGLSNYNYTSVQGLNLIFKNAKAIYDGTLVKANNKNKKLEKKFNEINHKRSLEGLPIITPDFEEPFDENGHLNNPPGINRNIYGYQGCAAKVFVPSKHKMVSLPKEYEGYNRDPNLSLAGFRNRLEIPEGEPGHVPWFQRMDIPEGQIGHVNKIQRFNFVHGKNSGKVKFSDKTGRVKRYHHSKYKDATKPYKFLEESKKVSALDSILAIITIGDDWVVFDIRGLYRNVFYRELAQKGLTAVQLLDLFTGDPVIDPKKGVVTFSYKEGVVPVFSQKIVPRFKSRDTLEKLTSQGPVALLSVDLGQNEPVAARVCSLKNINDKITLDNSCRISFLDDYKKQIKDYRDSLDELEIKIRLEAINSLETNQQVEIRDLDVFSADRAKANTVDMFDIDPNLISWDSMSDARVSTQISDLYLKNGGDESRVYFEINNKRIKRSDYNISQLVRPKLSDSTRKNLNDSIWKLKRTSEEYLKLSKRKLELSRAVVNYTIRQSKLLSGINDIVIILEDLDVKKKFNGRGIRDIGWDNFFSSRKENRWFIPAFHKAFSELSSNRGLCVIEVNPAWTSATCPDCGFCSKENRDGINFTCRKCGVSYHADIDVATLNIARVAVLGKPMSGPADRERLGDTKKPRVARSRKTMKRKDISNSTVEAMVTA

SEQ ID NO: 224 - protein, 765 aa, synthetic construct
  REGION 1..765: note = Casphi-4 polypeptide sequence
MYSLEMADLKSEPSLLAKLLRDRFPGKYWLPKYWKLAEKKRLTGGEEAACEYMADKQLDSPPPNFRPPARCVILAKSRPFEDWPVHRVASKAQSFVIGLSEQGFAALRAAPPSTADARRDWLRSHGASEDDLMALEAQLLETIMGNAISLHGGVLKKIDNANVKAAKRLSGRNEARLNKGLQELPPEQEGSAYGADGLLVNPPGLNLNIYCRKSCCPKPVKNTARFVGHYPGYLRDSDSILISGTMDRLTIIEGMPGHIPAWQREQGLVKPGGRRRRLSGSESNMRQKVDPSTGPRRSTRSGTVNRSNQRTGRNGDPLLVEIRMKEDWVLLDARGLLRNLRWRESKRGLSCDHEDLSLSGLLALFSGDPVIDPVRNEVVFLYGEGIIPVRSTKPVGTRQSKKLLERQASMGPLTLISCDLGQTNLIAGRASAISLTHGSLGVRSSVRIELDPEIIKSFERLRKDADRLETEILTAAKETLSDEQRGEVNSHEKDSPQTAKASLCRELGLHPPSLPWGQMGPSTTFIADMLISHGRDDDAFLSHGEFPTLEKRKKFDKRFCLESRPLLSSETRKALNESLWEVKRTSSEYARLSQRKKEMARRAVNFVVEISRRKTGLSNVIVNIEDLNVRIFHGGGKQAPGWDGFFRPKSENRWFIQAIHKAFSDLAAHHGIPVIESDPQRTSMTCPECGHCDSKNRNGVRFLCKGCGASMDADFDAACRNLERVALTGKPMPKPSTSCERLLSATTGKVCSDHSLSHDAIEKAS

SEQ ID NO: 225 - protein, 793 aa, synthetic construct
  REGION 1..793: note = Casphi-5 polypeptide sequence
MSSLPTPLELLKQKHADLFKGLQFSSKDNKMAGKVLKKDGEEAALAFLSERGVSRGELPNFRPPAKTLVVAQSRPFEEFPIYRVSEAIQLYVYSLSVKELETVPSGSSTKKEHQRFFQDSSVPDFGYTSVQGLNKIFGLARGIYLGVITRGENQLQKAKSKHEALNKKRRASGEAETEFDPTPYEYMTPERKLAKPPGVNHSIMCYVDISVDEFDFRNPDGIVLPSEYAGYCREINTAIEKGTVDRLGHLKGGPGYIPGHQRKESTTEGPKINFRKGRIRRSYTALYAKRDSRRVRQGKLALPSYRHHMMRLNSNAESAILAVIFFGKDWVVFDLRGLLRNVRWRNLFVDGSTPSTLLGMFGDPVIDPKRGVVAFCYKEQIVPVVSKSITKMVKAPELLNKLYLKSEDPLVLVAIDLGQTNPVGVGVYRVMNASLDYEVVTRFALESELLREIESYRQRTNAFEAQIRAETFDAMTSEEQEEITRVRAFSASKAKENVCHRFGMPVDAVDWATMGSNTIHIAKWVMRHGDPSLVEVLEYRKDNEIKLDKNGVPKKVKLTDKRIANLTSIRLRFSQETSKHYNDTMWELRRKHPVYQKLSKSKADFSRRVVNSIIRRVNHLVPRARIVFIIEDLKNLGKVFHGSGKRELGWDSYFEPKSENRWFIQVLHKAFSETGKHKGYYIIECWPNWTSCTCPKCSCCDSENRHGEVFRCLACGYTCNTDFGTAPDNLVKIATTGKGLPGPKKRCKGSSKGKNPKIARSSETGVSVTESGAPKVKKSSPTQTSQSSSQSAP

SEQ ID NO: 226 - protein, 441 aa, synthetic construct
  REGION 1..441: note = Casphi-6 polypeptide sequence
MNKIEKEKTPLAKLMNENFAGLRFPFAIIKQAGKKLLKEGELKTIEYMTGKGSIEPLPNFKPPVKCLIVAKRRDLKYFPICKASCEIQSYVYSLNYKDFMDYFSTPMTSQKQHEEFFKKSGLNIEYQNVAGLNLIFNNVKNTYNGVILKVKNRNEKLKKKAIKNNYEFEEIKTFNDDGCLINKPGINNVIYCFQSISPKILKNITHLPKEYNDYDCSVDRNIIQKYVSRLDIPESQPGHVPEWQRKLPEFNNTNNPRRRRKWYSNGRNISKGYSVDQVNQAKIEDSLLAQIKIGEDWIILDIRGLLRDLNRRELISYKNKLTIKDVLGFFSDYPIIDIKKNLVTFCYKEGVIQVVSQKSIGNKKSKQLLEKLIENKPIALVSIDLGQTNPVSVKISKLNKINNKISIESFTYRFLNEEILKEIEKYRKDYDKLELKLINEA

SEQ ID NO: 227 - protein, 772 aa, synthetic construct
  REGION 1..772: note = Casphi-7 polypeptide sequence
MSNTAVSTREHMSNKTTPPSPLSLLLRAHFPGLKFESQDYKIAGKKLRDGGPEAVISYLTGKGQAKLKDVKPPAKAFVIAQSRPFIEWDLVRVSRQIQEKIFGIPATKGRPKQDGLSETAFNEAVASLEVDGKSKLNEETRAAFYEVLGLDAPSLHAQAQNALIKSAISIREGVLKKVENRNEKNLSKTKRRKEAGEEATFVEEKAHDERGYLIHPPGVNQTIPGYQAVVIKSCPSDFIGLPSGCLAKESAEALTDYLPHDRMTIPKGQPGYVPEWQHPLLNRRKNRRRRDWYSASLNKPKATCSKRSGTPNRKNSRTDQIQSGRFKGAIPVLMRFQDEWVIIDIRGLLRNARYRKLLKEKSTIPDLLSLFTGDPSIDMRQGVCTFIYKAGQACSAKMVKTKNAPEILSELTKSGPVVLVSIDLGQTNPIAAKVSRVTQLSDGQLSHETLLRELLSNDSSDGKEIARYRVASDRLRDKLANLAVERLSPEHKSEILRAKNDTPALCKARVCAALGLNPEMIAWDKMTPYTEFLATAYLEKGGDRKVATLKPKNRPEMLRRDIKFKGTEGVRIEVSPEAAEAYREAQWDLQRTSPEYLRLSTWKQELTKRILNQLRHKAAKSSQCEVVVMAFEDLNIKMMHGNGKWADGGWDAFFIKKRENRWFMQAFHKSLTELGAHKGVPTIEVTPHRTSITCTKCGHCDKANRDGERFACQKCGFVAHADLEIATDNIERVALTGKPMPKPESERSGDAKKSVGARKAAFKPEEDAEAAE

SEQ ID NO: 228 - protein, 717 aa, synthetic construct
  REGION 1..717: note = Casphi-8 polypeptide sequence
MIKPTVSQFLTPGFKLIRNHSRTAGLKLKNEGEEACKKFVRENEIPKDECPNFQGGPAIANIIAKSREFTEWEIYQSSLAIQEVIFTLPKDKLPEPILKEEWRAQWLSEHGLDTVPYKEAAGLNLIIKNAVNTYKGVQVKVDNKNKNNLAKINRKNEIAKLNGEQEISFEEIKAFDDKGYLLQKPSPNKSIYCYQSVSPKPFITSKYHNVNLPEEYIGYYRKSNEPIVSPYQFDRLRIPIGEPGYVPKWQYTFLSKKENKRRKLSKRIKNVSPILGIICIKKDWCVFDMRGLLRTNHWKKYHKPTDSINDLFDYFTGDPVIDTKANVVRFRYKMENGIVNYKPVREKKGKELLENICDQNGSCKLATVDVGQNNPVAIGLFELKKVNGELTKTLISRHPTPIDFCNKITAYRERYDKLESSIKLDAIKQLTSEQKIEVDNYNNNFTPQNTKQIVCSKLNINPNDLPWDKMISGTHFISEKAQVSNKSEIYFTSTDKGKTKDVMKSDYKWFQDYKPKLSKEVRDALSDIEWRLRRESLEFNKLSKSREQDARQLANWISSMCDVIGIENLVKKNNFFGGSGKREPGWDNFYKPKKENRWWINAIHKALTELSQNKGKRVILLPAMRTSITCPKCKYCDSKNRNGEKFNCLKCGIELNADIDVATENLATVAITAQSMPKPTCERSGDAKKPVRARKAKAPEFHDKLAPSYTVVLREAV

SEQ ID NO: 229 - protein, 793 aa, synthetic construct
  REGION 1..793: note = Casphi-9 polypeptide sequence
MRSSREIGDKILMRQPAEKTAFQVFRQEVIGTQKLSGGDAKTAGRLYKQGKMEAAREWLLKGARDDVPPNFQPPAKCLVVAVSHPFEEWDISKTNHDVQAYIYAQPLQAEGHLNGLSEKWEDTSADQHKLWFEKTGVPDRGLPVQAINKIAKAAVNRAFGVVRKVENRNEKRRSRDNRIAEHNRENGLTEVVREAPEVATNADGFLLHPPGIDPSILSYASVSPVPYNSSKHSFVRLPEEYQAYNVEPDAPIPQFVVEDRFAIPPGQPGYVPEWQRLKCSTNKHRRMRQWSNQDYKPKAGRRAKPLEFQAHLTRERAKGALLVVMRIKEDWVVFDVRGLLRNVEWRKVLSEEAREKLTLKGLLDLFTGDPVIDTKRGIVTFLYKAEITKILSKRTVKTKNARDLLLRLTEPGEDGLRREVGLVAVDLGQTHPIAAAIYRIGRTSAGALESTVLHRQGLREDQKEKLKEYRKRHTALDSRLRKEAFETLSVEQQKEIVTVSGSGAQITKDKVCNYLGVDPSTLPWEKMGSYTHFISDDFLRRGGDPNIVHFDRQPKKGKVSKKSQRIKRSDSQWVGRMRPRLSQETAKARMEADWAAQNENEEYKRLARSKQELARWCVNTLLQNTRCITQCDEIVVVIEDLNVKSLHGKGAREPGWDNFFTPKTENRWFIQILHKTFSELPKHRGEHVIEGCPLRTSITCPACSYCDKNSRNGEKFVCVACGATFHADFEVATYNLVRLATTGMPMPKSLERQGGGEKAGGARKARKKAKQVEKIVVQANANVTMNGASLHSP

SEQ ID NO: 230 - protein, 812 aa, synthetic construct
  REGION 1..812: note = Casphi-10 polypeptide sequence
MDMLDTETNYATETPAQQQDYSPKPPKKAQRAPKGFSKKARPEKKPPKPITLFTQKHFSGVRFLKRVIRDASKILKLSESRTITFLEQAIERDGSAPPDVTPPVHNTIMAVTRPFEEWPEVILSKALQKHCYALTKKIKIKTWPKKGPGKKCLAAWSARTKIPLIPGQVQATNGLFDRIGSIYDGVEKKVTNRNANKKLEYDEAIKEGRNPAVPEYETAYNIDGTLINKPGYNPNLYITQSRTPRLITEADRPLVEKILWQMVEKKTQSRNQARRARLEKAAHLQGLPVPKFVPEKVDRSQKIEIRIIDPLDKIEPYMPQDRMAIKASQDGHVPYWQRPFLSKRRNRRVRAGWGKQVSSIQAWLTGALLVIVRLGNEAFLADIRGALRNAQWRKLLKPDATYQSLFNLFTGDPVVNTRTNHLTMAYREGVVNIVKSRSFKGRQTREHLLTLLGQGKTVAGVSFDLGQKHAAGLLAAHFGLGEDGNPVFTPIQACFLPQRYLDSLTNYRNRYDALTLDMRRQSLLALTPAQQQEFADAQRDPGGQAKRACCLKLNLNPDEIRWDLVSGISTMISDLYIERGGDPRDVHQQVETKPKGKRKSEIRILKIRDGKWAYDFRPKIADETRKAQREQLWKLQKASSEFERLSRYKINIARAIANWALQWGRELSGCDIVIPVLEDLNVGSKFFDGKGKWLLGWDNRFTPKKENRWFIKVLHKAVAELAPHRGVPVYEVMPHRTSMTCPACHYCHPTNREGDRFECQSCHVVKNTDRDVAPYNILRVAVEGKTLDRWQAEKKPQAEPDRPMILIDNQES

SEQ ID NO: 231 - protein, 84 aa, synthetic construct
  REGION 1..84: note = synthetic polypeptide sequence
MTNLSDIIEKETGKQLVIQESILMLPEEVEEVIGNKPESDILVHTAYDESTDENVMLLTSDAPEYKPWALVIQDSNGENKIKML

SEQ ID NO: 232 - protein, 1129 aa, Alicyclobacillus acidoterrestris
  REGION 1..1129: note = MISC_FEATURE - Cas12b/C2c1; sp|T0D7A2|C2C1_ALIAG CRISPR-associated endonuclease C2c1 OS = Alicyclobacillus acido-terrestris (strain ATCC 49025 /DSM 3922/ CIP 106132 / NCIMB 13137/GD3B) GN=c2c1 PE=1 SV=1; Cas12b/C2c1 polypeptide sequence
MAVKSIKVKLRLDDMPEIRAGLWKLHKEVNAGVRYYTEWLSLLRQENLYRRSPNGDGEQECDKTAEECKAELLERLRARQVENGHRGPAGSDDELLQLARQLYELLVPQAIGAKGDAQQIARKFLSPLADKDAVGGLGIAKAGNKPRWVRMREAGEPGWEEEKEKAETRKSADRTADVLRALADFGLKPLMRVYTDSEMSSVEWKPLRKGQAVRTWDRDMFQQAIERMMSWESWNQRVGQEYAKLVEQKNRFEQKNFVGQEHLVHLVNQLQQDMKEASPGLESKEQTAHYVTGRALRGSDKVFEKWGKLAPDAPFDLYDAEIKNVQRRNTRRFGSHDLFAKLAEPEYQALWREDASFLTRYAVYNSILRKLNHAKMFATFTLPDATAHPIWTRFDKLGGNLHQYTFLFNEFGERRHAIRFHKLLKVENGVAREVDDVTVPISMSEQLDNLLPRDPNEPIALYFRDYGAEQHFTGEFGGAKIQCRRDQLAHMHRRRGARDVYLNVSVRVQSQSEARGERRPPYAAVFRLVGDNHRAFVHFDKLSDYLAEHPDDGKLGSEGLLSGLRVMSVDLGLRTSASISVFRVARKDELKPNSKGRVPFFFPIKGNDNLVAVHERSQLLKLPGETESKDLRAIREERQRTLRQLRTQLAYLRLLVRCGSEDVGRRERSWAKLIEQPVDAANHMTPDWREAFENELQKLKSLHGICSDKEWMDAVYESVRRVWRHMGKQVRDWRKDVRSGERPKIRGYAKDVVGGNSIEQIEYLERQYKFLKSWSFFGKVSGQVIRAEKGSRFAITLREHIDHAKEDRLKKLADRIIMEALGYVYALDERGKGKWVAKYPPCQLILLEELSEYQFNNDRPPSENNQLMQWSHRGVFQELINQAQVHDLLVGTMYAAFSSRFDARTGAPGIRCRRVPARCTQEHNPEPFPWWLNKFVVEHTLDACPLRADDLIPTGEGEIFVSPFSAEEGDFHQIHADLNAAQNLQQRLWSDFDISQIRLRCDWGEVDGELVLIPRLTGKRTADSYSNKVFYTNTGVTYYERERGKKRRKVFAQEKLSEEEAELLVEADEAREKSVVLMRDPSGIINRGNWTRQKEFWSMVNQRIEGYLVKQIRSRVPLQDSACENTGDI

SEQ ID NO: 233 - protein, 1368 aa, Mus musculus
  REGION 1..1368: note = MISC_FEATURE - high fidelity Cas9 polypeptide sequence
MDKKYSIGLAIGTNSVGWAVITDEYKVPSKKFKVLGNTDRHSIKKNLIGALLFDSGETAEATRLKRTARRRYTRRKNRICYLQEIFSNEMAKVDDSFFHRLEESFLVEEDKKHERHPIFGNIVDEVAYHEKYPTIYHLRKKLVDSTDKADLRLIYLALAHMIKFRGHFLIEGDLNPDNSDVDKLFIQLVQTYNQLFEENPINASGVDAKAILSARLSKSRRLENLIAQLPGEKKNGLFGNLIALSLGLTPNFKSNFDLAEDAKLQLSKDTYDDDLDNLLAQIGDQYADLFLAAKNLSDAILLSDILRVNTEITKAPLSASMIKRYDEHHQDLTLLKALVRQQLPEKYKEIFFDQSKNGYAGYIDGGASQEEFYKFIKPILEKMDGTEELLVKLNREDLLRKQRTFDNGSIPHQIHLGELHAILRRQEDFYPFLKDNREKIEKILTFRIPYYVGPLARGNSRFAWMTRKSEETITPWNFEEVVDKGASAQSFIERMTAFDKNLPNEKVLPKHSLLYEYFTVYNELTKVKYVTEGMRKPAFLSGEQKKAIVDLLFKTNRKVTVKQLKEDYFKKIECFDSVEISGVEDRFNASLGTYHDLLKIIKDKDFLDNEENEDILEDIVLTLTLFEDREMIEERLKTYAHLFDDKVMKQLKRRRYTGWGALSRKLINGIRDKQSGKTILDFLKSDGFANRNFMALIHDDSLTFKEDIQKAQVSGQGDSLHEHIANLAGSPAIKKGILQTVKVVDELVKVMGRHKPENIVIEMARENQTTQKGQKNSRERMKRIEEGIKELGSQILKEHPVENTQLQNEKLYLYYLQNGRDMYVDQELDINRLSDYDVDHIVPQSFLKDDSIDNKVLTRSDKNRGKSDNVPSEEVVKKMKNYWRQLLNAKLITQRKFDNLTKAERGGLSELDKAGFIKRQLVETRAITKHVAQILDSRMNTKYDENDKLIREVKVITLKSKLVSDFRKDFQFYKVREINNYHHAHDAYLNAVVGTALIKKYPKLESEFVYGDYKVYDVRKMIAKSEQEIGKATAKYFFYSNIMNFFKTEITLANGEIRKRPLIETNGETGEIVWDKGRDFATVRKVLSMPQVNIVKKTEVQTGGFSKESILPKRNSDKLIARKKDWDPKKYGGFDSPTVAYSVLVVAKVEKGKSKKLKSVKELLGITIMERSSFEKNPIDFLEAKGYKEVKKDLIIKLPKYSLFELENGRKRMLASAGELQKGNELALPSKYVNFLYLASHYEKLKGSPEDNEQKQLFVEQHKHYLDEIIEQISEFSKRVILADANLDKVLSAYNKHRDKPIREQAENIIHLFTLTNLGAPAAFKYFDTTIDRKRYTSTKEVLDATLIHQSITGLYETRIDLSQLGGD

SEQ ID NO: 234 - protein, 1368 aa, Streptococcus pyogenes
  REGION 1..1368: note = MISC_FEATURE - PAM-binding SpEQR Cas9 polypeptide sequence
MDKKYSIGLAIGTNSVGWAVITDEYKVPSKKFKVLGNTDRHSIKKNLIGALLFDSGETAEATRLKRTARRRYTRRKNRICYLQEIFSNEMAKVDDSFFHRLEESVLVEEDKKHERHPIFGNIVDEVAYHEKYPTIYHLRKKLVDSTDKADLRLIYLALAHMIKFRGHFLIEGDLNPDNSDVDKLFIQLVQTYNQLFEENPINASGVDAKAILSARLSKSRRLENLIAQLPGEKKNGLFGNLIALSLGLTPNFKSNFDLAEDAKLQLSKDTYDDDLDNLLAQIGDQYADLFLAAKNLSDAILLSDILRVNTEITKAPLSASMIKRYDEHHQDLTLLKALVRQQLPEKYKEIFFDQSKNGYAGYIDGGASQEEFYKFIKPILEKMDGTEELLVKLNREDLLRKQRTFDNGSIPHQIHLGELHAILRRQEDFYPFLKDNREKIEKILTFRIPYYVGPLARGNSRFAWMTRKSEETITPWNFEEVVDKGASAQSFIERMTNFDKNLPNEKVLPKHSLLYEYFTVYNELTKVKYVTEGMRKPAFLSGEQKKAIVDLLFKTNRKVTVKQLKEDYFKKIECFDSVEISGVEDRFNASLGTYHDLLKIIKDKDFLDNEENEDILEDIVLTLTLFEDREMIEERLKTYAHLFDDKVMKQLKRRRYTGWGRLSRKLINGIRDKQSGKTILDFLKSDGFANRNFMQLIHDDSLTFKEDIQKAQVSGQGDSLHEHIANLAGSPAIKKGILQTVKVVDELVKVMGRHKPENIVIEMARENQTTQKGQKNSRERMKRIEEGIKELGSQILKEHPVENTQLQNEKLYLYYLQNGRDMYVDQELDINRLSDYDVDHIVPQSFLKDDSIDNKVLTRSDKNRGKSDNVPSEEVVKKMKNYWRQLLNAKLITQRKFDNLTKAERGGLSELDKAGFIKRQLVETRQITKHVAQILDSRMNTKYDENDKLIREVKVITLKSKLVSDFRKDFQFYKVREINNYHHAHDAYLNAVVGTALIKKYPKLESEFVYGDYKVYDVRKMIAKSEQEIGKATAKYFFYSNIMNFFKTEITLANGEIRKRPLIETNGETGEIVWDKGRDFATVRKVLSMPQVNIVKKTEVQTGGFSKESILPKRNSDKLIARKKDWDPKKYGGFESPTVAYSVLVVAKVEKGKSKKLKSVKELLGITIMERSSFEKNPIDFLEAKGYKEVKKDLIIKLPKYSLFELENGRKRMLASAGELQKGNELALPSKYVNFLYLASHYEKLKGSPEDNEQKQLFVEQHKHYLDEIIEQISEFSKRVILADANLDKVLSAYNKHRDKPIREQAENIIHLFTLTNLGAPAAFKYFDTTIDRKQYRSTKEVLDATLIHQSITGLYETRIDLSQLGGD

SEQ ID NO: 235 - protein, 1368 aa, Streptococcus pyogenes
  REGION 1..1368: note = MISC_FEATURE - PAM-binding SpVQR Cas9 polypeptide sequence
MDKKYSIGLAIGTNSVGWAVITDEYKVPSKKFKVLGNTDRHSIKKNLIGALLFDSGETAEATRLKRTARRRYTRRKNRICYLQEIFSNEMAKVDDSFFHRLEESFLVEEDKKHERHPIFGNIVDEVAYHEKYPTIYHLRKKLVDSTDKADLRLIYLALAHMIKFRGHFLIEGDLNPDNSDVDKLFIQLVQTYNQLFEENPINASGVDAKAILSARLSKSRRLENLIAQLPGEKKNGLFGNLIALSLGLTPNFKSNFDLAEDAKLQLSKDTYDDDLDNLLAQIGDQYADLFLAAKNLSDAILLSDILRVNTEITKAPLSASMIKRYDEHHQDLTLLKALVRQQLPEKYKEIFFDQSKNGYAGYIDGGASQEEFYKFIKPILEKMDGTEELLVKLNREDLLRKQRTFDNGSIPHQIHLGELHAILRRQEDFYPFLKDNREKIEKILTFRIPYYVGPLARGNSRFAWMTRKSEETITPWNFEEVVDKGASAQSFIERMTNFDKNLPNEKVLPKHSLLYEYFTVYNELTKVKYVTEGMRKPAFLSGEQKKAIVDLLFKTNRKVTVKQLKEDYFKKIECFDSVEISGVEDRFNASLGTYHDLLKIIKDKDFLDNEENEDILEDIVLTLTLFEDREMIEERLKTYAHLFDDKVMKQLKRRRYTGWGRLSRKLINGIRDKQSGKTILDFLKSDGFANRNFMQLIHDDSLTFKEDIQKAQVSGQGDSLHEHIANLAGSPAIKKGILQTVKVVDELVKVMGRHKPENIVIEMARENQTTQKGQKNSRERMKRIEEGIKELGSQILKEHPVENTQLQNEKLYLYYLQNGRDMYVDQELDINRLSDYDVDHIVPQSFLKDDSIDNKVLTRSDKNRGKSDNVPSEEVVKKMKNYWRQLLNAKLITQRKFDNLTKAERGGLSELDKAGFIKRQLVETRQITKHVAQILDSRMNTKYDENDKLIREVKVITLKSKLVSDFRKDFQFYKVREINNYHHAHDAYLNAVVGTALIKKYPKLESEFVYGDYKVYDVRKMIAKSEQEIGKATAKYFFYSNIMNFFKTEITLANGEIRKRPLIETNGETGEIVWDKGRDFATVRKVLSMPQVNIVKKTEVQTGGFSKESILPKRNSDKLIARKKDWDPKKYGGFVSPTVAYSVLVVAKVEKGKSKKLKSVKELLGITIMERSSFEKNPIDFLEAKGYKEVKKDLIIKLPKYSLFELENGRKRMLASAGELQKGNELALPSKYVNFLYLASHYEKLKGSPEDNEQKQLFVEQHKHYLDEIIEQISEFSKRVILADANLDKVLSAYNKHRDKPIREQAENIIHLFTLTNLGAPAAFKYFDTTIDRKQYRSTKEVLDATLIHQSITGLYETRIDLSQLGGD

SEQ ID NO: 236 - protein, 1368 aa, Streptococcus pyogenes
  REGION 1..1368: note = MISC_FEATURE - SpVQR Cas9 polypeptide sequence
MDKKYSIGLAIGTNSVGWAVITDEYKVPSKKFKVLGNTDRHSIKKNLIGALLFDSGETAEATRLKRTARRRYTRRKNRICYLQEIFSNEMAKVDDSFFHRLEESFLVEEDKKHERHPIFGNIVDEVAYHEKYPTIYHLRKKLVDSTDKADLRLIYLALAHMIKFRGHFLIEGDLNPDNSDVDKLFIQLVQTYNQLFEENPINASGVDAKAILSARLSKSRRLENLIAQLPGEKKNGLFGNLIALSLGLTPNFKSNFDLAEDAKLQLSKDTYDDDLDNLLAQIGDQYADLFLAAKNLSDAILLSDILRVNTEITKAPLSASMIKRYDEHHQDLTLLKALVRQQLPEKYKEIFFDQSKNGYAGYIDGGASQEEFYKFIKPILEKMDGTEELLVKLNREDLLRKQRTFDNGSIPHQIHLGELHAILRRQEDFYPFLKDNREKIEKILTFRIPYYVGPLARGNSRFAWMTRKSEETITPWNFEEVVDKGASAQSFIERMTNFDKNLPNEKVLPKHSLLYEYFTVYNELTKVKYVTEGMRKPAFLSGEQKKAIVDLLFKTNRKVTVKQLKEDYFKKIECFDSVEISGVEDRFNASLGTYHDLLKIIKDKDFLDNEENEDILEDIVLTLTLFEDREMIEERLKTYAHLFDDKVMKQLKRRRYTGWGRLSRKLINGIRDKQSGKTILDFLKSDGFANRNFMQLIHDDSLTFKEDIQKAQVSGQGDSLHEHIANLAGSPAIKKGILQTVKVVDELVKVMGRHKPENIVIEMARENQTTQKGQKNSRERMKRIEEGIKELGSQILKEHPVENTQLQNEKLYLYYLQNGRDMYVDQELDINRLSDYDVDHIVPQSFLKDDSIDNKVLTRSDKNRGKSDNVPSEEVVKKMKNYWRQLLNAKLITQRKFDNLTKAERGGLSELDKAGFIKRQLVETRQITKHVAQILDSRMNTKYDENDKLIREVKVITLKSKLVSDFRKDFQFYKVREINNYHHAHDAYLNAVVGTALIKKYPKLESEFVYGDYKVYDVRKMIAKSEQEIGKATAKYFFYSNIMNFFKTEITLANGEIRKRPLIETNGETGEIVWDKGRDFATVRKVLSMPQVNIVKKTEVQTGGFSKESILPKRNSDKLIARKKDWDPKKYGGFVSPTVAYSVLVVAKVEKGKSKKLKSVKELLGITIMERSSFEKNPIDFLEAKGYKEVKKDLIIKLPKYSLFELENGRKRMLASARELQKGNELALPSKYVNFLYLASHYEKLKGSPEDNEQKQLFVEQHKHYLDEIIEQISEFSKRVILADANLDKVLSAYNKHRDKPIREQAENIIHLFTLTNLGAPAAFKYFDTTIDRKEYRSTKEVLDATLIHQSITGLYETRIDLSQLGGD

SEQ ID NO: 237 - protein, 1359 aa, Streptococcus macacae
  REGION 1..1359: note = MISC_FEATURE - SpyMacCas9 polypeptide sequence
MDKKYSIGLDIGTNSVGWAVITDDYKVPSKKFKVLGNTDRHSIKKNLIGALLFGSGETAEATRLKRTARRRYTRRKNRICYLQEIFSNEMAKVDDSFFHRLEESFLVEEDKKHERHPIFGNIVDEVAYHEKYPTIYHLRKKLADSTDKADLRLIYLALAHMIKFRGHFLIEGDLNPDNSDVDKLFIQLVQIYNQLFEENPINASRVDAKAILSARLSKSRRLENLIAQLPGEKRNGLFGNLIALSLGLTPNFKSNFDLAEDAKLQLSKDTYDDDLDNLLAQIGDQYADLFLAAKNLSDAILLSDILRVNSEITKAPLSASMIKRYDEHHQDLTLLKALVRQQLPEKYKEIFFDQSKNGYAGYIDGGASQEEFYKFIKPILEKMDGTEELLVKLNREDLLRKQRTFDNGSIPHQIHLGELHAILRRQEDFYPFLKDNREKIEKILTFRIPYYVGPLARGNSRFAWMTRKSEETITPWNFEEVVDKGASAQSFIERMTNFDKNLPNEKVLPKHSLLYEYFTVYNELTKVKYVTEGMRKPAFLSGEQKKAIVDLLFKTNRKVTVKQLKEDYFKKIECFDSVEISGVEDRFNASLGAYHDLLKIIKDKDFLDNEENEDILEDIVLTLTLFEDRGMIEERLKTYAHLFDDKVMKQLKRRRYTGWGRLSRKLINGIRDKQSGKTILDFLKSDGFANRNFMQLIHDDSLTFKEDIQKAQVSGQGHSLHEQIANLAGSPAIKKGILQTVKIVDELVKVMGHKPENIVIEMARENQTTQKGQKNSRERMKRIEEGIKELGSQILKEHPVENTQLQNEKLYLYYLQNGRDMYVDQELDINRLSDYDVDHIVPQSFIKDDSIDNKVLTRSDKNRGKSDNVPSEEVVKKMKNYWRQLLNAKLITQRKFDNLTKAERGGLSELDKAGFIKRQLVETRQITKHVAQILDSRMNTKYDENDKLIREVKVITLKSKLVSDFRKDFQFYKVREINNYHHAHDAYLNAVVGTALIKKYPKLESEFVYGDYKVYDVRKMIAKSEQEIGKATAKYFFYSNIMNFFKTEITLANGEIRKRPLIETNGETGEIVWDKGRDFATVRKVLSMPQVNIVKKTEIQTVGQNGGLFDDNPKSPLEVTPSKLVPLKKELNPKKYGGYQKPTTAYPVLLITDTKQLIPISVMNKKQFEQNPVKFLRDRGYQQVGKNDFIKLPKYTLVDIGDGIKRLWASSKEIHKGNQLVVSKKSQILLYHAHHLDSDLSNDYLQNHNQQFDVLFNEIISFSKKCKLGKEHIQKIENVYSNKKNSASIEELAESFIKLLGFTQLGATSPFNFLGVKLNQKQYKGKKDYILPCTEGTLIRQSITGLYETRVDLSKIGED

SEQ ID NO: 238 - protein, 1410 aa, synthetic construct
  REGION 1..1410: note = CP5 polypeptide sequence
  REGION 1..341: note = MISC_FEATURE - Sequence derived from Cas9
  REGION 342..362: note = MISC_FEATURE - Linker sequence
  REGION 363..1388: note = MISC_FEATURE - Sequence derived from Cas9
  REGION 1389..1410: note = MISC_FEATURE - Bipartite nuclear localization sequence
EIGKATAKYFFYSNIMNFFKTEITLANGEIRKRPLIETNGETGEIVWDKGRDFATVRKVLSMPQVNIVKKTEVQTGGFSKESILPKRNSDKLIARKKDWDPKKYGGFMQPTVAYSVLVVAKVEKGKSKKLKSVKELLGITIMERSSFEKNPIDFLEAKGYKEVKKDLIIKLPKYSLFELENGRKRMLASAKFLQKGNELALPSKYVNFLYLASHYEKLKGSPEDNEQKQLFVEQHKHYLDEIIEQISEFSKRVILADANLDKVLSAYNKHRDKPIREQAENIIHLFTLTNLGAPRAFKYFDTTIARKEYRSTKEVLDATLIHQSITGLYETRIDLSQLGGDGGSGGSGGSGGSGGSGGSGGMDKKYSIGLAIGTNSVGWAVITDEYKVPSKKFKVLGNTDRHSIKKNLIGALLFDSGETAEATRLKRTARRRYTRRKNRICYLQEIFSNEMAKVDDSFFHRLEESFLVEEDKKHERHPIFGNIVDEVAYHEKYPTIYHLRKKLVDSTDKADLRLIYLALAHMIKFRGHFLIEGDLNPDNSDVDKLFIQLVQTYNQLFEENPINASGVDAKAILSARLSKSRRLENLIAQLPGEKKNGLFGNLIALSLGLTPNFKSNFDLAEDAKLQLSKDTYDDDLDNLLAQIGDQYADLFLAAKNLSDAILLSDILRVNTEITKAPLSASMIKRYDEHHQDLTLLKALVRQQLPEKYKEIFFDQSKNGYAGYIDGGASQEEFYKFIKPILEKMDGTEELLVKLNREDLLRKQRTFDNGSIPHQIHLGELHAILRRQEDFYPFLKDNREKIEKILTFRIPYYVGPLARGNSRFAWMTRKSEETITPWNFEEVVDKGASAQSFIERMTNFDKNLPNEKVLPKHSLLYEYFTVYNELTKVKYVTEGMRKPAFLSGEQKKAIVDLLFKTNRKVTVKQLKEDYFKKIECFDSVEISGVEDRFNASLGTYHDLLKIIKDKDFLDNEENEDILEDIVLTLTLFEDREMIEERLKTYAHLFDDKVMKQLKRRRYTGWGRLSRKLINGIRDKQSGKTILDFLKSDGFANRNFMQLIHDDSLTFKEDIQKAQVSGQGDSLHEHIANLAGSPAIKKGILQTVKVVDELVKVMGRHKPENIVIEMARENQTTQKGQKNSRERMKRIEEGIKELGSQILKEHPVENTQLQNEKLYLYYLQNGRDMYVDQELDINRLSDYDVDHIVPQSFLKDDSIDNKVLTRSDKNRGKSDNVPSEEVVKKMKNYWRQLLNAKLITQRKFDNLTKAERGGLSELDKAGFIKRQLVETRQITKHVAQILDSRMNTKYDENDKLIREVKVITLKSKLVSDFRKDFQFYKVREINNYHHAHDAYLNAVVGTALIKKYPKLESEFVYGDYKVYDVRKMIAKSEQEGADKRTADGSEFESPKKKRKV

SEQ ID NO: 239 - protein, 1302 aa, synthetic construct
  REGION 1..1302: note = Cas12c1 polypeptide sequence
MQTKKTHLHLISAKASRKYRRTIACLSDTAKKDLERRKQSGAADPAQELSCLKTIKFKLEVPEGSKLPSFDRISQIYNALETIEKGSLSYLLFALILSGFRIFPNSSAAKTFASSSCYKNDQFASQIKEIFGEMVKNFIPSELESILKKGRRKNNKDWTEENIKRVLNSEFGRKNSEGSSALFDSFLSKFSQELFRKFDSWNEVNKKYLEAAELLDSMLASYGPFDSVCKMIGDSDSRNSLPDKSTIAFTNNAEITVDIESSVMPYMAIAALLREYRQSKSKAAPVAYVQSHLTTTNGNGLSWFFKFGLDLIRKAPVSSKQSTSDGSKSLQELFSVPDDKLDGLKFIKEACEALPEASLLCGEKGELLGYQDFRTSFAGHIDSWVANYVNRLFELIELVNQLPESIKLPSILTQKNHNLVASLGLQEAEVSHSLELFEGLVKNVRQTLKKLAGIDISSSPNEQDIKEFYAFSDVLNRLGSIRNQIENAVQTAKKDKIDLESAIEWKEWKKLKKLPKLNGLGGGVPKQQELLDKALESVKQIRHYQRIDFERVIQWAVNEHCLETVPKFLVDAEKKKINKESSTDFAAKENAVRFLLEGIGAAARGKTDSVSKAAYNWFVVNNFLAKKDLNRYFINCQGCIYKPPYSKRRSLAFALRSDNKDTIEVVWEKFETFYKEISKEIEKFNIFSQEFQTFLHLENLRMKLLLRRIQKPIPAEIAFFSLPQEYYDSLPPNVAFLALNQEITPSEYITQFNLYSSFLNGNLILLRRSRSYLRAKFSWVGNSKLIYAAKEARLWKIPNAYWKSDEWKMILDSNVLVFDKAGNVLPAPTLKKVCEREGDLRLFYPLLRQLPHDWCYRNPFVKSVGREKNVIEVNKEGEPKVASALPGSLFRLIGPAPFKSLLDDCFFNPLDKDLRECMLIVDQEISQKVEAQKVEASLESCTYSIAVPIRYHLEEPKVSNQFENVLAIDQGEAGLAYAVFSLKSIGEAETKPIAVGTIRIPSIRRLIHSVSTYRKKKQRLQNFKQNYDSTAFIMRENVTGDVCAKIVGLMKEFNAFPVLEYDVKNLESGSRQLSAVYKAVNSHFLYFKEPGRDALRKQLWYGGDSWTIDGIEIVTRERKEDGKEGVEKIVPLKVFPGRSVSARFTSKTCSCCGRNVFDWLFTEKKAKTNKKFNVNSKGELTTADGVIQLFEADRSKGPKFYARRKERTPLTKPIAKGSYSLEEIERRVRTNLRRAPKSKQSRDTSQSQYFCVYKDCALHFSGMQADENAAINIGRRFLTALRKNRRSDFPSNVKISDRLLDN

SEQ ID NO: 240 - protein, 1218 aa, synthetic construct
  REGION 1..1218: note = Cas12c2 polypeptide sequence
MTKHSIPLHAFRNSGADARKWKGRIALLAKRGKETMRTLQFPLEMSEPEAAAINTTPFAVAYNAIEGTGKGTLFDYWAKLHLAGFRFFPSGGAATIFRQQAVFEDASWNAAFCQQSGKDWPWLVPSKLYERFTKAPREVAKKDGSKKSIEFTQENVANESHVSLVGASITDKTPEDQKEFFLKMAGALAEKFDSWKSANEDRIVAMKVIDEFLKSEGLHLPSLENIAVKCSVETKPDNATVAWHDAPMSGVQNLAIGVFATCASRIDNIYDLNGGKLSKLIQESATTPNVTALSWLFGKGLEYFRTTDIDTIMQDFNIPASAKESIKPLVESAQAIPTMTVLGKKNYAPFRPNFGGKIDSWIANYASRLMLLNDILEQIEPGFELPQALLDNETLMSGIDMTGDELKELIEAVYAWVDAAKQGLATLLGRGGNVDDAVQTFEQFSAMMDTLNGTLNTISARYVRAVEMAGKDEARLEKLIECKFDIPKWCKSVPKLVGISGGLPKVEEEIKVMNAAFKDVRARMFVRFEEIAAYVASKGAGMDVYDALEKRELEQIKKLKSAVPERAHIQAYRAVLHRIGRAVQNCSEKTKQLFSSKVIEMGVFKNPSHLNNFIFNQKGAIYRSPFDRSRHAPYQLHADKLLKNDWLELLAEISATLMASESTEQMEDALRLERTRLQLQLSGLPDWEYPASLAKPDIEVEIQTALKMQLAKDTVTSDVLQRAFNLYSSVLSGLTFKLLRRSFSLKMRFSVADTTQLIYVPKVCDWAIPKQYLQAEGEIGIAARVVTESSPAKMVTEVEMKEPKALGHFMQQAPHDWYFDASLGGTQVAGRIVEKGKEVGKERKLVGYRMRGNSAYKTVLDKSLVGNTELSQCSMIIEIPYTQTVDADFRAQVQAGLPKVSINLPVKETITASNKDEQMLFDRFVAIDLGERGLGYAVFDAKTLELQESGHRPIKAITNLLNRTHHYEQRPNQRQKFQAKFNVNLSELRENTVGDVCHQINRICAYYNAFPVLEYMVPDRLDKQLKSVYESVTNRYIWSSTDAHKSARVQFWLGGETWEHPYLKSAKDKKPLVLSPGRGASGKGTSQTCSCCGRNPFDLIKDMKPRAKIAVVDGKAKLENSELKLFERNLESKDDMLARRHRNERAGMEQPLTPGNYTVDEIKALLRANLRRAPKNRRTKDTTVSEYHCVFSDCGKTMHADENAAVNIGGKFIADIEK

SEQ ID NO: 241 - protein, 1252 aa, Oleiphilus sp.
  REGION 1..1252: note = MISC_FEATURE - OspCas12c polypeptide sequence
MTKLRHRQKKLTHDWAGSKKREVLGSNGKLQNPLLMPVKKGQVTEFRKAFSAYARATKGEMTDGRKNMFTHSFEPFKTKPSLHQCELADKAYQSLHSYLPGSLAHFLLSAHALGFRIFSKSGEATAFQASSKIEAYESKLASELACVDLSIQNLTISTLFNALTTSVRGKGEETSADPLIARFYTLLTGKPLSRDTQGPERDLAEVISRKIASSFGTWKEMTANPLQSLQFFEEELHALDANVSLSPAFDVLIKMNDLQGDLKNRTIVFDPDAPVFEYNAEDPADIIIKLTARYAKEAVIKNQNVGNYVKNAITTTNANGLGWLLNKGLSLLPVSTDDELLEFIGVERSHPSCHALIELIAQLEAPELFEKNVFSDTRSEVQGMIDSAVSNHIARLSSSRNSLSMDSEELERLIKSFQIHTPHCSLFIGAQSLSQQLESLPEALQSGVNSADILLGSTQYMLTNSLVEESIATYQRTLNRINYLSGVAGQINGAIKRKAIDGEKIHLPAAWSELISLPFIGQPVIDVESDLAHLKNQYQTLSNEFDTLISALQKNFDLNFNKALLNRTQHFEAMCRSTKKNALSKPEIVSYRDLLARLTSCLYRGSLVLRRAGIEVLKKHKIFESNSELREHVHERKHFVFVSPLDRKAKKLLRLTDSRPDLLHVIDEILQHDNLENKDRESLWLVRSGYLLAGLPDQLSSSFINLPIITQKGDRRLIDLIQYDQINRDAFVMLVTSAFKSNLSGLQYRANKQSFVVTRTLSPYLGSKLVYVPKDKDWLVPSQMFEGRFADILQSDYMVWKDAGRLCVIDTAKHLSNIKKSVFSSEEVLAFLRELPHRTFIQTEVRGLGVNVDGIAFNNGDIPSLKTFSNCVQVKVSRTNTSLVQTLNRWFEGGKVSPPSIQFERAYYKKDDQIHEDAAKRKIRFQMPATELVHASDDAGWTPSYLLGIDPGEYGMGLSLVSINNGEVLDSGFIHINSLINFASKKSNHQTKVVPRQQYKSPYANYLEQSKDSAAGDIAHILDRLIYKLNALPVFEALSGNSQSAADQVWTKVLSFYTWGDNDAQNSIRKQHWFGASHWDIKGMLRQPPTEKKPKPYIAFPGSQVSSYGNSQRCSCCGRNPIEQLREMAKDTSIKELKIRNSEIQLFDGTIKLFNPDPSTVIERRRHNLGPSRIPVADRTFKNISPSSLEFKELITIVSRSIRHSPEFIAKKRGIGSEYFCAYSDCNSSLNSEANAAANVAQKFQKQLFFEL

SEQ ID NO: 242 - protein, 767 aa, synthetic construct
  REGION 1..767: note = Cas12g1 polypeptide sequence
MAQASSTPAVSPRPRPRYREERTLVRKLLPRPGQSKQEFRENVKKLRKAFLQFNADVSGVCQWAIQFRPRYGKPAEPTETFWKFFLEPETSLPPNDSRSPEFRRLQAFEAAAGINGAAALDDPAFTNELRDSILAVASRPKTKEAQRLFSRLKDYQPAHRMILAKVAAEWIESRYRRAHQNWERNYEEWKKEKQEWEQNHPELTPEIREAFNQIFQQLEVKEKRVRICPAARLLQNKDNCQYAGKNKHSVLCNQFNEFKKNHLQGKAIKFFYKDAEKYLRCGLQSLKPNVQGPFREDWNKYLRYMNLKEETLRGKNGGRLPHCKNLGQECEFNPHTALCKQYQQQLSSRPDLVQHDELYRKWRREYWREPRKPVFRYPSVKRHSIAKIFGENYFQADFKNSVVGLRLDSMPAGQYLEFAFAPWPRNYRPQPGETEISSVHLHFVGTRPRIGFRFRVPHKRSRFDCTQEELDELRSRTFPRKAQDQKFLEAARKRLLETFPGNAEQELRLLAVDLGTDSARAAFFIGKTFQQAFPLKIVKIEKLYEQWPNQKQAGDRRDASSKQPRPGLSRDHVGRHLQKMRAQASEIAQKRQELTGTPAPETTTDQAAKKATLQPFDLRGLTVHTARMIRDWARLNARQIIQLAEENQVDLIVLESLRGFRPPGYENLDQEKKRRVAFFAHGRIRRKVTEKAVERGMRVVTVPYLASSKVCAECRKKQKDNKQWEKNKKRGLFKCEGCGSQAQVDENAARVLGRVFWGEIELPTAIP

SEQ ID NO: 243 - protein, 870 aa, synthetic construct
  REGION 1..870: note = Cas12h1 polypeptide sequence
MKVHEIPRSQLLKIKQYEGSFVEWYRDLQEDRKKFASLLFRWAAFGYAAREDDGATYISPSQALLERRLLLGDAEDVAIKFLDVLFKGGAPSSSCYSLFYEDFALRDKAKYSGAKREFIEGLATMPLDKIIERIRQDEQLSKIPAEEWLILGAEYSPEEIWEQVAPRIVNVDRSLGKQLRERLGIKCRRPHDAGYCKILMEVVARQLRSHNETYHEYLNQTHEMKTKVANNLTNEFDLVCEFAEVLEEKNYGLGWYVLWQGVKQALKEQKKPTKIQIAVDQLRQPKFAGLLTAKWRALKGAYDTWKLKKRLEKRKAFPYMPNWDNDYQIPVGLTGLGVFTLEVKRTEVVVDLKEHGKLFCSHSHYFGDLTAEKHPSRYHLKFRHKLKLRKRDSRVEPTIGPWIEAALREITIQKKPNGVFYLGLPYALSHGIDNFQIAKRFFSAAKPDKEVINGLPSEMVVGAADLNLSNIVAPVKARIGKGLEGPLHALDYGYGELIDGPKILTPDGPRCGELISLKRDIVEIKSAIKEFKACQREGLTMSEETTTWLSEVESPSDSPRCMIQSRIADTSRRLNSFKYQMNKEGYQDLAEALRLLDAMDSYNSLLESYQRMHLSPGEQSPKEAKFDTKRASFRDLLRRRVAHTIVEYFDDCDIVFFEDLDGPSDSDSRNNALVKLLSPRTLLLYIRQALEKRGIGMVEVAKDGTSQNNPISGHVGWRNKQNKSEIYFYEDKELLVMDADEVGAMNILCRGLNHSVCPYSFVTKAPEKKNDEKKEGDYGKRVKRFLKDRYGSSNVRFLVASMGFVTVTTKRPKDALVGKRLYYHGGELVTHDLHNRMKDEIKYLVEKEVLARRVSLSDSTIKSYKSFAHV

SEQ ID NO: 244 - protein, 1093 aa, synthetic construct
  REGION 1..1093: note = Cas12i1 polypeptide sequence
MSNKEKNASETRKAYTTKMIPRSHDRMKLLGNFMDYLMDGTPIFFELWNQFGGGIDRDIISGTANKDKISDDLLLAVNWFKVMPINSKPQGVSPSNLANLFQQYSGSEPDIQAQEYFASNFDTEKHQWKDMRVEYERLLAELQLSRSDMHHDLKLMYKEKCIGLSLSTAHYITSVMFGTGAKNNRQTKHQFYSKVIQLLEESTQINSVEQLASIILKAGDCDSYRKLRIRCSRKGATPSILKIVQDYELGTNHDDEVNVPSLIANLKEKLGRFEYECEWKCMEKIKAFLASKVGPYYLGSYSAMLENALSPIKGMTTKNCKFVLKQIDAKNDIKYENEPFGKIVEGFFDSPYFESDTNVKWVLHPHHIGESNIKTLWEDLNAIHSKYEEDIASLSEDKKEKRIKVYQGDVCQTINTYCEEVGKEAKTPLVQLLRYLYSRKDDIAVDKIIDGITFLSKKHKVEKQKINPVIQKYPSFNFGNNSKLLGKIISPKDKLKHNLKCNRNQVDNYIWIEIKVLNTKTMRWEKHHYALSSTRFLEEVYYPATSENPPDALAARFRTKTNGYEGKPALSAEQIEQIRSAPVGLRKVKKRQMRLEAARQQNLLPRYTWGKDFNINICKRGNNFEVTLATKVKKKKEKNYKVVLGYDANIVRKNTYAAIEAHANGDGVIDYNDLPVKPIESGFVTVESQVRDKSYDQLSYNGVKLLYCKPHVESRRSFLEKYRNGTMKDNRGNNIQIDFMKDFEAIADDETSLYYFNMKYCKLLQSSIRNHSSQAKEYREEIFELLRDGKLSVLKLSSLSNLSFVMFKVAKSLIGTYFGHLLKKPKNSKSDVKAPPITDEDKQKADPEMFALRLALEEKRLNKVKSKKEVIANKIVAKALELRDKYGPVLIKGENISDTTKKGKKSSTNSFLMDWLARGVANKVKEMVMMHQGLEFVEVNPNFTSHQDPFVHKNPENTFRARYSRCTPSELTEKNRKEILSFLSDKPSKRPTNAYYNEGAMAFLATYGLKKNDVLGVSLEKFKQIMANILHQRSEDQLLFPSRGGMFYLATYKLDADATSVNWNGKQFWVCNADLVAAYNVGLVDIQKDFKKK

SEQ ID NO: 245 - protein, 1054 aa, synthetic construct
  REGION 1..1054: note = Cas12i2 polypeptide sequence
MSSAIKSYKSVLRPNERKNQLLKSTIQCLEDGSAFFFKMLQGLFGGITPEIVRFSTEQEKQQQDIALWCAVNWFRPVSQDSLTHTIASDNLVEKFEEYYGGTASDAIKQYFSASIGESYYWNDCRQQYYDLCRELGVEVSDLTHDLEILCREKCLAVATESNQNNSIISVLFGTGEKEDRSVKLRITKKILEAISNLKEIPKNVAPIQEIILNVAKATKETFRQVYAGNLGAPSTLEKFIAKDGQKEFDLKKLQTDLKKVIRGKSKERDWCCQEELRSYVEQNTIQYDLWAWGEMFNKAHTALKIKSTRNYNFAKQRLEQFKEIQSLNNLLVVKKLNDFFDSEFFSGEETYTICVHHLGGKDLSKLYKAWEDDPADPENAIVVLCDDLKNNFKKEPIRNILRYIFTIRQECSAQDILAAAKYNQQLDRYKSQKANPSVLGNQGFTWTNAVILPEKAQRNDRPNSLDLRIWLYLKLRHPDGRWKKHHIPFYDTRFFQEIYAAGNSPVDTCQFRTPRFGYHLPKLTDQTAIRVNKKHVKAAKTEARIRLAIQQGTLPVSNLKITEISATINSKGQVRIPVKFDVGRQKGTLQIGDRFCGYDQNQTASHAYSLWEVVKEGQYHKELGCFVRFISSGDIVSITENRGNQFDQLSYEGLAYPQYADWRKKASKFVSLWQITKKNKKKEIVTVEAKEKFDAICKYQPRLYKFNKEYAYLLRDIVRGKSLVELQQIRQEIFRFIEQDCGVTRLGSLSLSTLETVKAVKGIIYSYFSTALNASKNNPISDEQRKEFDPELFALLEKLELIRTRKKKQKVERIANSLIQTCLENNIKFIRGEGDLSTTNNATKKKANSRSMDWLARGVFNKIRQLAPMHNITLFGCGSLYTSHQDPLVHRNPDKAMKCRWAAIPVKDIGDWVLRKLSQNLRAKNIGTGEYYHQGVKEFLSHYELQDLEEELLKWRSDRKSNIPCWVLQNRLAEKLGNKEAVVYIPVRGGRIYFATHKVATGAVSIVFDQKQVWVCNADHVAAANIALTVKGIGEQSSDEENPDGSRIKLQLTS

SEQ ID NO: 246 - protein, 4 aa, synthetic construct
  REGION 1..4: note = synthetic peptide sequence
GGGS

SEQ ID NO: 247 - protein, 5 aa, synthetic construct
  REGION 1..5: note = synthetic peptide sequence
GGGGS

SEQ ID NO: 248 - protein, 5 aa, synthetic construct
  REGION 1..5: note = synthetic peptide sequence
EAAAK

SEQ ID NO: 249 - protein, 16 aa, synthetic construct
  REGION 1..16: note = synthetic peptide sequence
SGSETPGTSESATPES

SEQ ID NO: 250 - protein, 6 aa, synthetic construct
  REGION 1..6: note = linker peptide sequence
GGSGGS

SEQ ID NO: 251 - protein, 20 aa, synthetic construct
  REGION 1..20: note = synthetic peptide sequence
GSSGSETPGTSESATPESSG

SEQ ID NO: 252 - DNA, 18 bp, synthetic construct
  misc_feature 1..18: note = synthetic oligonucleotide sequence
  source 1..18: mol_type = other DNA
ggaggctctggaggaagc

SEQ ID NO: 253 - DNA, 60 bp, synthetic construct
  misc_feature 1..60: note = synthetic oligonucleotide sequence
  source 1..60: mol_type = other DNA
ggctcttctggatctgaaacacctggcacaagcgagagcgccacccctgagagctctggc

SEQ ID NO: 254 - protein, 1129 aa, Alicyclobacillus acidiphilus
  REGION 1..1129: note = MISC_FEATURE - AacCas12b polypeptide sequence
MAVKSMKVKLRLDNMPEIRAGLWKLHTEVNAGVRYYTEWLSLLRQENLYRRSPNGDGEQECYKTAEECKAELLERLRARQVENGHCGPAGSDDELLQLARQLYELLVPQAIGAKGDAQQIARKFLSPLADKDAVGGLGIAKAGNKPRWVRMREAGEPGWEEEKAKAEARKSTDRTADVLRALADFGLKPLMRVYTDSDMSSVQWKPLRKGQAVRTWDRDMFQQAIERMMSWESWNQRVGEAYAKLVEQKSRFEQKNFVGQEHLVQLVNQLQQDMKEASHGLESKEQTAHYLTGRALRGSDKVFEKWEKLDPDAPFDLYDTEIKNVQRRNTRRFGSHDLFAKLAEPKYQALWREDASFLTRYAVYNSIVRKLNHAKMFATFTLPDATAHPIWTRFDKLGGNLHQYTFLFNEFGEGRHAIRFQKLLTVEDGVAKEVDDVTVPISMSAQLDDLLPRDPHELVALYFQDYGAEQHLAGEFGGAKIQYRRDQLNHLHARRGARDVYLNLSVRVQSQSEARGERRPPYAAVFRLVGDNHRAFVHFDKLSDYLAEHPDDGKLGSEGLLSGLRVMSVDLGLRTSASISVFRVARKDELKPNSEGRVPFCFPIEGNENLVAVHERSQLLKLPGETESKDLRAIREERQRTLRQLRTQLAYLRLLVRCGSEDVGRRERSWAKLIEQPMDANQMTPDWREAFEDELQKLKSLYGICGDREWTEAVYESVRRVWRHMGKQVRDWRKDVRSGERPKIRGYQKDVVGGNSIEQIEYLERQYKFLKSWSFFGKVSGQVIRAEKGSRFAITLREHIDHAKEDRLKKLADRIIMEALGYVYALDDERGKGKWVAKYPPCQLILLEELSEYQFNNDRPPSENNQLMQWSHRGVFQELLNQAQVHDLLVGTMYAAFSSRFDARTGAPGIRCRRVPARCAREQNPEPFPWWLNKFVAEHKLDGCPLRADDLIPTGEGEFFVSPFSAEEGDFHQIHADLNAAQNLQRRLWSDFDISQIRLRCDWGEVDGEPVLIPRTTGKRTADSYGNKVFYTKTGVTYYERERGKKRRKVFAQEELSEEEAELLVEADEAREKSVVLMRDPSGIINRGDWTRQKEFWSMVNQRIEGYLVKQIRSRVRLQESACENTGDI

SEQ ID NO: 255 - protein, 1140 aa, Bacillus hisashii
  REGION 1..1140: note = MISC_FEATURE - BhCas12b polypeptide sequence
MAPKKKRKVGIHGVPAAATRSFILKIEPNEEVKKGLWKTHEVLNHGIAYYMNILKLIRQEAIYEHHEQDPKNPKKVSKAEIQAELWDFVLKMQKCNSFTHEVDKDEVFNILRELYEELVPSSVEKKGEANQLSNKFLYPLVDPNSQSGKGTASSGRKPRWYNLKIAGDPSWEEEKKKWEEDKKKDPLAKILGKLAEYGLIPLFIPYTDSNEPIVKEIKWMEKSRNQSVRRLDKDMFIQALERFLSWESWNLKVKEEYEKVEKEYKTLEERIKEDIQALKALEQYEKERQEQLLRDTLNTNEYRLSKRGLRGWREIIQKWLKMDENEPSEKYLEVFKDYQRKHPREAGDYSVYEFLSKKENHFIWRNHPEYPYLYATFCEIDKKKKDAKQQATFTLADPINHPLWVRFEERSGSNLNKYRILTEQLHTEKLKKKLTVQLDRLIYPTESGGWEEKGKVDIVLLPSRQFYNQIFLDIEEKGKHAFTYKDESIKFPLKGTLGGARVQFDRDHLRRYPHKVESGNVGRIYFNMTVNIEPTESPVSKSLKIHRDDFPKVVNFKPKELTEWIKDSKGKKLKSGIESLEIGLRVMSIDLGQRQAAAASIFEVVDQKPDIEGKLFFPIKGTELYAVHRASFNIKLPGETLVKSREVLRKAREDNLKLMNQKLNFLRNVLHFQQFEDITEREKRVTKWISRQENSDVPLVYQDELIQIRELMYKPYKDWVAFLKQLHKRLEVEIGKEVKHWRKSLSDGRKGLYGISLKNIDEIDRTRKFLLRWSLRPTEPGEVRRLEPGQRFAIDQLNHLNALKEDRLKKMANTIIMHALGYCYDVRKKKWQAKNPACQIILFEDLSNYNPYEERSRFENSKLMKWSRREIPRQVALQGEIYGLQVGEVGAQFSSRFHAKTGSPGIRCSVVTKEKLQDNRFFKNLQREGRLTLDKIAVLKEGDLYPDKGGEKFISLSKDRKCVTTHADINAAQNLQKRFWTRTHGFYKVYCKAYQVDGQTVYIPESKDQKQKIIEEFGEGYFILKDGVYEWVNAGKLKIKKGSSKQSSSELVDSDILKDSFDLASELKGEKLMLYRDPSGNVFPSDKWMAAGVFFGKLERILISKLTNQYSISTIEDDSSKQSMKRPAATKKAGQAKKKK

SEQ ID NO: 256 - protein, 1108 aa, Bacillus thermoamylovorans
  REGION 1..1108: note = MISC_FEATURE - BTCas12b polypeptide sequence
MATRSFILKIEPNEEVKKGLWKTHEVLNHGIAYYMNILKLIRQEAIYEHHEQDPKNPKKVSKAEIQAELWDFVLKMQKCNSFTHEVDKDVVFNILRELYEELVPSSVEKKGEANQLSNKFLYPLVDPNSQSGKGTASSGRKPRWYNLKIAGDPSWEEEKKKWEEDKKKDPLAKILGKLAEYGLIPLFIPFTDSNEPIVKEIKWMEKSRNQSVRRLDKDMFIQALERFLSWESWNLKVKEEYEKVEKEHKTLEERIKEDIQAFKSLEQYEKERQEQLLRDTLNTNEYRLSKRGLRGWREIIQKWLKMDENEPSEKYLEVFKDYQRKHPREAGDYSVYEFLSKKENHFIWRNHPEYPYLYATFCEIDKKKKDAKQQATFTLADPINHPLWVRFEERSGSNLNKYRILTEQLHTEKLKKKLTVQLDRLIYPTESGGWEEKGKVDIVLLPSRQFYNQIFLDIEEKGKHAFTYKDESIKFPLKGTLGGARVQFDRDHLRRYPHKVESGNVGRIYFNMTVNIEPTESPVSKSLKIHRDDFPKFVNFKPKELTEWIKDSKGKKLKSGIESLEIGLRVMSIDLGQRQAAAASIFEVVDQKPDIEGKLFFPIKGTELYAVHRASFNIKLPGETLVKSREVLRKAREDNLKLMNQKLNFLRNVLHFQQFEDITEREKRVTKWISRQENSDVPLVYQDELIQIRELMYKPYKDWVAFLKQLHKRLEVEIGKEVKHWRKSLSDGRKGLYGISLKNIDEIDRTRKFLLRWSLRPTEPGEVRRLEPGQRFAIDQLNHLNALKEDRLKKMANTIIMHALGYCYDVRKKKWQAKNPACQIILFEDLSNYNPYEERSRFENSKLMKWSRREIPRQVALQGEIYGLQVGEVGAQFSSRFHAKTGSPGIRCSVVTKEKLQDNRFFKNLQREGRLTLDKIAVLKEGDLYPDKGGEKFISLSKDRKLVTTHADINAAQNLQKRFWTRTHGFYKVYCKAYQVDGQTVYIPESKDQKQKIIEEFGEGYFILKDGVYEWGNAGKLKIKKGSSKQSSSELVDSDILKDSFDLASELKGEKLMLYRDPSGNVFPSDKWMAAGVFFGKLERILISKLTNQYSISTIEDDSSKQSM

SEQ ID NO: 257 - protein, 1112 aa, Bacillus sp.
  REGION 1..1112: note = MISC_FEATURE - BvCas12b (Bacillus sp. V3-13) polypeptide sequence
MAIRSIKLKMKTNSGTDSIYLRKALWRTHQLINEGIAYYMNLLTLYRQEAIGDKTKEAYQAELINIIRNQQRNNGSSEEHGSDQEILALLRQLYELIIPSSIGESGDANQLGNKFLYPLVDPNSQSGKGTSNAGRKPRWKRLKEEGNPDWELEKKKDEERKAKDPTVKIFDNLNKYGLLPLFPLFTNIQKDIEWLPLGKRQSVRKWDKDMFIQAIERLLSWESWNRRVADEYKQLKEKTESYYKEHLTGGEEWIEKIRKFEKERNMELEKNAFAPNDGYFITSRQIRGWDRVYEKWSKLPESASPEELWKVVAEQQNKMSEGFGDPKVFSFLANRENRDIWRGHSERIYHIAAYNGLQKKLSRTKEQATFTLPDAIEHPLWIRYESPGGTNLNLFKLEEKQKKNYYVTLSKIIWPSEEKWIEKENIEIPLAPSIQFNRQIKLKQHVKGKQEISFSDYSSRISLDGVLGGSRIQFNRKYIKNHKELLGEGDIGPVFFNLVVDVAPLQETRNGRLQSPIGKALKVISSDFSKVIDYKPKELMDWMNTGSASNSFGVASLLEGMRVMSIDMGQRTSASVSIFEVVKELPKDQEQKLFYSINDTELFAIHKRSFLLNLPGEVVTKNNKQQRQERRKKRQFVRSQIRMLANVLRLETKKTPDERKKAIHKLMEIVQSYDSWTASQKEVWEKELNLLTNMAAFNDEIWKESLVELHHRIEPYVGQIVSKWRKGLSEGRKNLAGISMWNIDELEDTRRLLISWSKRSRTPGEANRIETDEPFGSSLLQHIQNVKDDRLKQMANLIIMTALGFKYDKEEKDRYKRWKETYPACQIILFENLNRYLFNLDRSRRENSRLMKWAHRSIPRTVSMQGEMFGLQVGDVRSEYSSRFHAKTGAPGIRCHALTEEDLKAGSNTLKRLIEDGFINESELAYLKKGDIIPSQGGELFVTLSKRYKKDSDNNELTVIHADINAAQNLQKRFWQQNSEVYRVPCQLARMGEDKLYIPKSQTETIKKYFGKGSFVKNNTEQEVYKWEKSEKMKIKTDTTFDLQDLDGFEDISKTIELAQEQQKKYLTMFRDPSGYFFNNETWRPQKEYWSIVNNIIKSCLKKKILSNKVEL

SEQ ID NO: 258 - DNA, 47 bp, synthetic construct
  misc_feature 1..47: note = 5'UTR oligonucleotide sequence
  source 1..47: mol_type = other DNA
gggaaataagagagaaaagaagagtaagaagaaatataagagccacc

SEQ ID NO: 259 - DNA, 101 bp, synthetic construct
  misc_feature 1..101: note = 3'UTR (TriLink standard UTR)polynucleotide sequence
  source 1..101: mol_type = other DNA
gctggagcctcggtggccatgcttcttgccccttgggcctccccccagcccctcctccccttcctgcacccgtacccccgtggtctttgaataaagtctga

SEQ ID NO: 260 - DNA, 3420 bp, Bacillus hisashii
  misc_feature 1..3420: note = bhCas12b (V4) polynucleotide sequence
  source 1..3420: mol_type = genomic DNA
atggccccaaagaagaagcggaaggtcggtatccacggagtcccagcagccgccaccagatccttcatcctgaagatcgagcccaacgaggaagtgaagaaaggcctctggaaaacccacgaggtgctgaaccacggaatcgcctactacatgaatatcctgaagctgatccggcaagaggccatctacgagcaccacgagcaggaccccaagaatcccaagaaggtgtccaaggccgagatccaggccgagctgtgggatttcgtgctgaagatgcagaagtgcaacagcttcacacacgaggtggacaaggacgaggtgttcaacatcctgagagagctgtacgaggaactggtgcccagcagcgtggaaaagaagggcgaagccaaccagctgagcaacaagtttctgtaccctctggtggaccccaacagccagtctggaaagggaacagccagcagcggcagaaagcccagatggtacaacctgaagattgccggcgatccctcctgggaagaagagaagaagaagtgggaagaagataagaaaaaggacccgctggccaagatcctgggcaagctggctgagtacggactgatccctctgttcatcccctacaccgacagcaacgagcccatcgtgaaagaaatcaagtggatggaaaagtcccggaaccagagcgtgcggcggctggataaggacatgttcattcaggccctggaacggttcctgagctgggagagctggaacctgaaagtgaaagaggaatacgagaaggtcgagaaagagtacaagaccctggaagagaggatcaaagaggacatccaggctctgaaggctctggaacagtatgagaaagagcggcaagaacagctgctgcgggacaccctgaacaccaacgagtaccggctgagcaagagaggccttagaggctggcgggaaatcatccagaaatggctgaaaatggacgagaacgagccctccgagaagtacctggaagtgttcaaggactaccagcggaagcaccctagagaggccggcgattacagcgtgtacgagttcctgtccaagaaagagaaccacttcatctggcggaatcaccctgagtacccctacctgtacgccaccttctgcgagatcgacaagaaaaagaaggacgccaagcagcaggccaccttcacactggccgatcctatcaatcaccctctgtgggtccgattcgaggaaagaagcggcagcaacctgaacaagtacagaatcctgaccgagcagctgcacaccgagaagctgaagaaaaagctgacagtgcagctggaccggctgatctaccctacagaatctggcggctgggaagagaagggcaaagtggacattgtgctgctgcccagccggcagttctacaaccagatcttcctggacatcgaggaaaagggcaagcacgccttcacctacaaggatgagagcatcaagttccctctgaagggcacactcggcggagccagagtgcagttcgacagagatcacctgagaagataccctcacaaggtggaaagcggcaacgtgggcagaatctacttcaacatgaccgtgaacatcgagcctacagagtccccagtgtccaagtctctgaagatccaccgggacgacttccccaaggtggtcaacttcaagcccaaagaactgaccgagtggatcaaggacagcaagggcaagaaactgaagtccggcatcgagtccctggaaatcggcctgagagtgatgagcatcgacctgggacagagacaggccgctgccgcctctattttcgaggtggtggatcagaagcccgacatcgaaggcaagctgtttttcccaatcaagggcaccgagctgtatgccgtgcacagagccagcttcaacatcaagctgcccggcgagacactggtcaagagcagagaagtgctgcggaaggccagagaggacaatctgaaactgatgaaccagaagctcaacttcctgcggaacgtgctgcacttccagcagttcgaggacatcaccgagagagagaagcgggtcaccaagtggatcagcagacaagagaacagcgacgtgcccctggtgtaccaggatgagctgatccagatccgcgagctgatgtacaagccttacaaggactgggtcgccttcctgaagcagctccacaagagactggaagtcgagatcggcaaagaagtgaagcactggcggaagtccctgagcgacggaagaaagggcctgtacggcatctccctgaagaacatcgacgagatcgatcggacccggaagttcctgctgagatggtccctgaggcctaccgaacctggcgaagtgcgtagactggaacccggccagagattcgccatcgaccagctgaatcacctgaacgccctgaaagaagatcggctgaagaagatggccaacaccatcatcatgcacgccctgggctactgctacgacgtgcggaagaagaaatggcaggctaagaaccccgcctgccagatcatcctgttcgaggatctgagcaactacaacccctacgaggaaaggtcccgcttcgagaacagcaagctcatgaagtggtccagacgcgagatccccagacaggttgcactgcagggcgagatctatggcctgcaagtgggagaagtgggcgctcagttcagcagcagattccacgccaagacaggcagccctggcatcagatgtagcgtcgtgaccaaagagaagctgcaggacaatcggttcttcaagaatctgcagagagagggcagactgaccctggacaaaatcgccgtgctgaaagagggcgatctgtacccagacaaaggcggcgagaagttcatcagcctgagcaaggatcggaagtgcgtgaccacacacgccgacatcaacgccgctcagaacctgcagaagcggttctggacaagaacccacggcttctacaaggtgtactgcaaggcctaccaggtggacggccagaccgtgtacatccctgagagcaaggaccagaagcagaagatcatcgaagagttcggcgagggctacttcattctgaaggacggggtgtacgaatgggtcaacgccggcaagctgaaaatcaagaagggcagctccaagcagagcagcagcgagctggtggatagcgacatcctgaaagacagcttcgacctggcctccgagctgaaaggcgaaaagctgatgctgtacagggaccccagcggcaatgtgttccccagcgacaaatggatggccgctggcgtgttcttcggaaagctggaacgcatcctgatcagcaagctgaccaaccagtactccatcagcaccatcgaggacgacagcagcaagcagtctatgaaaaggccggcggccacgaaaaaggccggccaggcaaaaaagaaaaag

SEQ ID NO: 261 - protein, 17 aa, synthetic construct
  REGION 1..17: note = synthetic peptide sequence
MAPKKKRKVGIHGVPAA

SEQ ID NO: 262 - DNA, 51 bp, synthetic construct
  misc_feature 1..51: note = synthetic oligonucleotide sequence
  source 1..51: mol_type = other DNA
atggccccaaagaagaagcggaaggtcggtatccacggagtcccagcagcc

SEQ ID NO: 263 - protein, 1554 aa, synthetic construct
  REGION 1..1554: note = 101 Cas9 TadAins 1015 polypeptide sequence
MDKKYSIGLAIGTNSVGWAVITDEYKVPSKKFKVLGNTDRHSIKKNLIGALLFDSGETAEATRLKRTARRRYTRRKNRICYLQEIFSNEMAKVDDSFFHRLEESFLVEEDKKHERHPIFGNIVDEVAYHEKYPTIYHLRKKLVDSTDKADLRLIYLALAHMIKFRGHFLIEGDLNPDNSDVDKLFIQLVQTYNQLFEENPINASGVDAKAILSARLSKSRRLENLIAQLPGEKKNGLFGNLIALSLGLTPNFKSNFDLAEDAKLQLSKDTYDDDLDNLLAQIGDQYADLFLAAKNLSDAILLSDILRVNTEITKAPLSASMIKRYDEHHQDLTLLKALVRQQLPEKYKEIFFDQSKNGYAGYIDGGASQEEFYKFIKPILEKMDGTEELLVKLNREDLLRKQRTFDNGSIPHQIHLGELHAILRRQEDFYPFLKDNREKIEKILTFRIPYYVGPLARGNSRFAWMTRKSEETITPWNFEEVVDKGASAQSFIERMTNFDKNLPNEKVLPKHSLLYEYFTVYNELTKVKYVTEGMRKPAFLSGEQKKAIVDLLFKTNRKVTVKQLKEDYFKKIECFDSVEISGVEDRFNASLGTYHDLLKIIKDKDFLDNEENEDILEDIVLTLTLFEDREMIEERLKTYAHLFDDKVMKQLKRRRYTGWGRLSRKLINGIRDKQSGKTILDFLKSDGFANRNFMQLIHDDSLTFKEDIQKAQVSGQGDSLHEHIANLAGSPAIKKGILQTVKVVDELVKVMGRHKPENIVIEMARENQTTQKGQKNSRERMKRIEEGIKELGSQILKEHPVENTQLQNEKLYLYYLQNGRDMYVDQELDINRLSDYDVDHIVPQSFLKDDSIDNKVLTRSDKNRGKSDNVPSEEVVKKMKNYWRQLLNAKLITQRKFDNLTKAERGGLSELDKAGFIKRQLVETRQITKHVAQILDSRMNTKYDENDKLIREVKVITLKSKLVSDFRKDFQFYKVREINNYHHAHDAYLNAVVGTALIKKYPKLESEFVYGDYKVGSSGSETPGTSESATPESSGSEVEFSHEYWMRHALTLAKRARDEREVPVGAVLVLNNRVIGEGWNRAIGLHDPTAHAEIMALRQGGLVMQNYRLIDATLYVTFEPCVMCAGAMIHSRIGRVVFGVRNAKTGAAGSLMDVLHYPGMNHRVEITEGILADECAALLCYFFRMPRQVFNAQKKAQSSTDYDVRKMIAKSEQEIGKATAKYFFYSNIMNFFKTEITLANGEIRKRPLIETNGETGEIVWDKGRDFATVRKVLSMPQVNIVKKTEVQTGGFSKESILPKRNSDKLIARKKDWDPKKYGGFDSPTVAYSVLVVAKVEKGKSKKLKSVKELLGITIMERSSFEKNPIDFLEAKGYKEVKKDLIIKLPKYSLFELENGRKRMLASAGELQKGNELALPSKYVNFLYLASHYEKLKGSPEDNEQKQLFVEQHKHYLDEIIEQISEFSKRVILADANLDKVLSAYNKHRDKPIREQAENIIHLFTLTNLGAPAAFKYFDTTIDRKRYTSTKEVLDATLIHQSITGLYETRIDLSQLGGD

SEQ ID NO: 264 - protein, 1554 aa, synthetic construct
  REGION 1..1554: note = 102 Cas9 TadAins 1022 polypeptide sequence
MDKKYSIGLAIGTNSVGWAVITDEYKVPSKKFKVLGNTDRHSIKKNLIGALLFDSGETAEATRLKRTARRRYTRRKNRICYLQEIFSNEMAKVDDSFFHRLEESFLVEEDKKHERHPIFGNIVDEVAYHEKYPTIYHLRKKLVDSTDKADLRLIYLALAHMIKFRGHFLIEGDLNPDNSDVDKLFIQLVQTYNQLFEENPINASGVDAKAILSARLSKSRRLENLIAQLPGEKKNGLFGNLIALSLGLTPNFKSNFDLAEDAKLQLSKDTYDDDLDNLLAQIGDQYADLFLAAKNLSDAILLSDILRVNTEITKAPLSASMIKRYDEHHQDLTLLKALVRQQLPEKYKEIFFDQSKNGYAGYIDGGASQEEFYKFIKPILEKMDGTEELLVKLNREDLLRKQRTFDNGSIPHQIHLGELHAILRRQEDFYPFLKDNREKIEKILTFRIPYYVGPLARGNSRFAWMTRKSEETITPWNFEEVVDKGASAQSFIERMTNFDKNLPNEKVLPKHSLLYEYFTVYNELTKVKYVTEGMRKPAFLSGEQKKAIVDLLFKTNRKVTVKQLKEDYFKKIECFDSVEISGVEDRFNASLGTYHDLLKIIKDKDFLDNEENEDILEDIVLTLTLFEDREMIEERLKTYAHLFDDKVMKQLKRRRYTGWGRLSRKLINGIRDKQSGKTILDFLKSDGFANRNFMQLIHDDSLTFKEDIQKAQVSGQGDSLHEHIANLAGSPAIKKGILQTVKVVDELVKVMGRHKPENIVIEMARENQTTQKGQKNSRERMKRIEEGIKELGSQILKEHPVENTQLQNEKLYLYYLQNGRDMYVDQELDINRLSDYDVDHIVPQSFLKDDSIDNKVLTRSDKNRGKSDNVPSEEVVKKMKNYWRQLLNAKLITQRKFDNLTKAERGGLSELDKAGFIKRQLVETRQITKHVAQILDSRMNTKYDENDKLIREVKVITLKSKLVSDFRKDFQFYKVREINNYHHAHDAYLNAVVGTALIKKYPKLESEFVYGDYKVYDVRKMIGSSGSETPGTSESATPESSGSEVEFSHEYWMRHALTLAKRARDEREVPVGAVLVLNNRVIGEGWNRAIGLHDPTAHAEIMALRQGGLVMQNYRLIDATLYVTFEPCVMCAGAMIHSRIGRVVFGVRNAKTGAAGSLMDVLHYPGMNHRVEITEGILADECAALLCYFFRMPRQVFNAQKKAQSSTDAKSEQEIGKATAKYFFYSNIMNFFKTEITLANGEIRKRPLIETNGETGEIVWDKGRDFATVRKVLSMPQVNIVKKTEVQTGGFSKESILPKRNSDKLIARKKDWDPKKYGGFDSPTVAYSVLVVAKVEKGKSKKLKSVKELLGITIMERSSFEKNPIDFLEAKGYKEVKKDLIIKLPKYSLFELENGRKRMLASAGELQKGNELALPSKYVNFLYLASHYEKLKGSPEDNEQKQLFVEQHKHYLDEIIEQISEFSKRVILADANLDKVLSAYNKHRDKPIREQAENIIHLFTLTNLGAPAAFKYFDTTIDRKRYTSTKEVLDATLIHQSITGLYETRIDLSQLGGD

SEQ ID NO: 265 - protein, 1554 aa, synthetic construct
  REGION 1..1554: note = 103 Cas9 TadAins 1029 polypeptide sequence
MDKKYSIGLAIGTNSVGWAVITDEYKVPSKKFKVLGNTDRHSIKKNLIGALLFDSGETAEATRLKRTARRRYTRRKNRICYLQEIFSNEMAKVDDSFFHRLEESFLVEEDKKHERHPIFGNIVDEVAYHEKYPTIYHLRKKLVDSTDKADLRLIYLALAHMIKFRGHFLIEGDLNPDNSDVDKLFIQLVQTYNQLFEENPINASGVDAKAILSARLSKSRRLENLIAQLPGEKKNGLFGNLIALSLGLTPNFKSNFDLAEDAKLQLSKDTYDDDLDNLLAQIGDQYADLFLAAKNLSDAILLSDILRVNTEITKAPLSASMIKRYDEHHQDLTLLKALVRQQLPEKYKEIFFDQSKNGYAGYIDGGASQEEFYKFIKPILEKMDGTEELLVKLNREDLLRKQRTFDNGSIPHQIHLGELHAILRRQEDFYPFLKDNREKIEKILTFRIPYYVGPLARGNSRFAWMTRKSEETITPWNFEEVVDKGASAQSFIERMTNFDKNLPNEKVLPKHSLLYEYFTVYNELTKVKYVTEGMRKPAFLSGEQKKAIVDLLFKTNRKVTVKQLKEDYFKKIECFDSVEISGVEDRFNASLGTYHDLLKIIKDKDFLDNEENEDILEDIVLTLTLFEDREMIEERLKTYAHLFDDKVMKQLKRRRYTGWGRLSRKLINGIRDKQSGKTILDFLKSDGFANRNFMQLIHDDSLTFKEDIQKAQVSGQGDSLHEHIANLAGSPAIKKGILQTVKVVDELVKVMGRHKPENIVIEMARENQTTQKGQKNSRERMKRIEEGIKELGSQILKEHPVENTQLQNEKLYLYYLQNGRDMYVDQELDINRLSDYDVDHIVPQSFLKDDSIDNKVLTRSDKNRGKSDNVPSEEVVKKMKNYWRQLLNAKLITQRKFDNLTKAERGGLSELDKAGFIKRQLVETRQITKHVAQILDSRMNTKYDENDKLIREVKVITLKSKLVSDFRKDFQFYKVREINNYHHAHDAYLNAVVGTALIKKYPKLESEFVYGDYKVYDVRKMIAKSEQEIGSSGSETPGTSESATPESSGSEVEFSHEYWMRHALTLAKRARDEREVPVGAVLVLNNRVIGEGWNRAIGLHDPTAHAEIMALRQGGLVMQNYRLIDATLYVTFEPCVMCAGAMIHSRIGRVVFGVRNAKTGAAGSLMDVLHYPGMNHRVEITEGILADECAALLCYFFRMPRQVFNAQKKAQSSTDGKATAKYFFYSNIMNFFKTEITLANGEIRKRPLIETNGETGEIVWDKGRDFATVRKVLSMPQVNIVKKTEVQTGGFSKESILPKRNSDKLIARKKDWDPKKYGGFDSPTVAYSVLVVAKVEKGKSKKLKSVKELLGITIMERSSFEKNPIDFLEAKGYKEVKKDLIIKLPKYSLFELENGRKRMLASAGELQKGNELALPSKYVNFLYLASHYEKLKGSPEDNEQKQLFVEQHKHYLDEIIEQISEFSKRVILADANLDKVLSAYNKHRDKPIREQAENIIHLFTLTNLGAPAAFKYFDTTIDRKRYTSTKEVLDATLIHQSITGLYETRIDLSQLGGD

SEQ ID NO: 266 - protein, 1554 aa, synthetic construct
  REGION 1..1554: note = 103 Cas9 TadAins 1040 polypeptide sequence
MDKKYSIGLAIGTNSVGWAVITDEYKVPSKKFKVLGNTDRHSIKKNLIGALLFDSGETAEATRLKRTARRRYTRRKNRICYLQEIFSNEMAKVDDSFFHRLEESFLVEEDKKHERHPIFGNIVDEVAYHEKYPTIYHLRKKLVDSTDKADLRLIYLALAHMIKFRGHFLIEGDLNPDNSDVDKLFIQLVQTYNQLFEENPINASGVDAKAILSARLSKSRRLENLIAQLPGEKKNGLFGNLIALSLGLTPNFKSNFDLAEDAKLQLSKDTYDDDLDNLLAQIGDQYADLFLAAKNLSDAILLSDILRVNTEITKAPLSASMIKRYDEHHQDLTLLKALVRQQLPEKYKEIFFDQSKNGYAGYIDGGASQEEFYKFIKPILEKMDGTEELLVKLNREDLLRKQRTFDNGSIPHQIHLGELHAILRRQEDFYPFLKDNREKIEKILTFRIPYYVGPLARGNSRFAWMTRKSEETITPWNFEEVVDKGASAQSFIERMTNFDKNLPNEKVLPKHSLLYEYFTVYNELTKVKYVTEGMRKPAFLSGEQKKAIVDLLFKTNRKVTVKQLKEDYFKKIECFDSVEISGVEDRFNASLGTYHDLLKIIKDKDFLDNEENEDILEDIVLTLTLFEDREMIEERLKTYAHLFDDKVMKQLKRRRYTGWGRLSRKLINGIRDKQSGKTILDFLKSDGFANRNFMQLIHDDSLTFKEDIQKAQVSGQGDSLHEHIANLAGSPAIKKGILQTVKVVDELVKVMGRHKPENIVIEMARENQTTQKGQKNSRERMKRIEEGIKELGSQILKEHPVENTQLQNEKLYLYYLQNGRDMYVDQELDINRLSDYDVDHIVPQSFLKDDSIDNKVLTRSDKNRGKSDNVPSEEVVKKMKNYWRQLLNAKLITQRKFDNLTKAERGGLSELDKAGFIKRQLVETRQITKHVAQILDSRMNTKYDENDKLIREVKVITLKSKLVSDFRKDFQFYKVREINNYHHAHDAYLNAVVGTALIKKYPKLESEFVYGDYKVYDVRKMIAKSEQEIGKATAKYFFYSGSSGSETPGTSESATPESSGSEVEFSHEYWMRHALTLAKRARDEREVPVGAVLVLNNRVIGEGWNRAIGLHDPTAHAEIMALRQGGLVMQNYRLIDATLYVTFEPCVMCAGAMIHSRIGRVVFGVRNAKTGAAGSLMDVLHYPGMNHRVEITEGILADECAALLCYFFRMPRQVFNAQKKAQSSTDNIMNFFKTEITLANGEIRKRPLIETNGETGEIVWDKGRDFATVRKVLSMPQVNIVKKTEVQTGGFSKESILPKRNSDKLIARKKDWDPKKYGGFDSPTVAYSVLVVAKVEKGKSKKLKSVKELLGITIMERSSFEKNPIDFLEAKGYKEVKKDLIIKLPKYSLFELENGRKRMLASAGELQKGNELALPSKYVNFLYLASHYEKLKGSPEDNEQKQLFVEQHKHYLDEIIEQISEFSKRVILADANLDKVLSAYNKHRDKPIREQAENIIHLFTLTNLGAPAAFKYFDTTIDRKRYTSTKEVLDATLIHQSITGLYETRIDLSQLGGD

SEQ ID NO: 267 - protein, 1554 aa, synthetic construct
  REGION 1..1554: note = 105 Cas9 TadAins 1068 polypeptide sequence
MDKKYSIGLAIGTNSVGWAVITDEYKVPSKKFKVLGNTDRHSIKKNLIGALLFDSGETAEATRLKRTARRRYTRRKNRICYLQEIFSNEMAKVDDSFFHRLEESFLVEEDKKHERHPIFGNIVDEVAYHEKYPTIYHLRKKLVDSTDKADLRLIYLALAHMIKFRGHFLIEGDLNPDNSDVDKLFIQLVQTYNQLFEENPINASGVDAKAILSARLSKSRRLENLIAQLPGEKKNGLFGNLIALSLGLTPNFKSNFDLAEDAKLQLSKDTYDDDLDNLLAQIGDQYADLFLAAKNLSDAILLSDILRVNTEITKAPLSASMIKRYDEHHQDLTLLKALVRQQLPEKYKEIFFDQSKNGYAGYIDGGASQEEFYKFIKPILEKMDGTEELLVKLNREDLLRKQRTFDNGSIPHQIHLGELHAILRRQEDFYPFLKDNREKIEKILTFRIPYYVGPLARGNSRFAWMTRKSEETITPWNFEEVVDKGASAQSFIERMTNFDKNLPNEKVLPKHSLLYEYFTVYNELTKVKYVTEGMRKPAFLSGEQKKAIVDLLFKTNRKVTVKQLKEDYFKKIECFDSVEISGVEDRFNASLGTYHDLLKIIKDKDFLDNEENEDILEDIVLTLTLFEDREMIEERLKTYAHLFDDKVMKQLKRRRYTGWGRLSRKLINGIRDKQSGKTILDFLKSDGFANRNFMQLIHDDSLTFKEDIQKAQVSGQGDSLHEHIANLAGSPAIKKGILQTVKVVDELVKVMGRHKPENIVIEMARENQTTQKGQKNSRERMKRIEEGIKELGSQILKEHPVENTQLQNEKLYLYYLQNGRDMYVDQELDINRLSDYDVDHIVPQSFLKDDSIDNKVLTRSDKNRGKSDNVPSEEVVKKMKNYWRQLLNAKLITQRKFDNLTKAERGGLSELDKAGFIKRQLVETRQITKHVAQILDSRMNTKYDENDKLIREVKVITLKSKLVSDFRKDFQFYKVREINNYHHAHDAYLNAVVGTALIKKYPKLESEFVYGDYKVYDVRKMIAKSEQEIGKATAKYFFYSNIMNFFKTEITLANGEIRKRPLIETNGEGSSGSETPGTSESATPESSGSEVEFSHEYWMRHALTLAKRARDEREVPVGAVLVLNNRVIGEGWNRAIGLHDPTAHAEIMALRQGGLVMQNYRLIDATLYVTFEPCVMCAGAMIHSRIGRVVFGVRNAKTGAAGSLMDVLHYPGMNHRVEITEGILADECAALLCYFFRMPRQVFNAQKKAQSSTDTGEIVWDKGRDFATVRKVLSMPQVNIVKKTEVQTGGFSKESILPKRNSDKLIARKKDWDPKKYGGFDSPTVAYSVLVVAKVEKGKSKKLKSVKELLGITIMERSSFEKNPIDFLEAKGYKEVKKDLIIKLPKYSLFELENGRKRMLASAGELQKGNELALPSKYVNFLYLASHYEKLKGSPEDNEQKQLFVEQHKHYLDEIIEQISEFSKRVILADANLDKVLSAYNKHRDKPIREQAENIIHLFTLTNLGAPAAFKYFDTTIDRKRYTSTKEVLDATLIHQSITGLYETRIDLSQLGGD

SEQ ID NO: 268 - protein, 1554 aa, synthetic construct
  REGION 1..1554: note = 106 Cas9 TadAins 1247 polypeptide sequence
MDKKYSIGLAIGTNSVGWAVITDEYKVPSKKFKVLGNTDRHSIKKNLIGALLFDSGETAEATRLKRTARRRYTRRKNRICYLQEIFSNEMAKVDDSFFHRLEESFLVEEDKKHERHPIFGNIVDEVAYHEKYPTIYHLRKKLVDSTDKADLRLIYLALAHMIKFRGHFLIEGDLNPDNSDVDKLFIQLVQTYNQLFEENPINASGVDAKAILSARLSKSRRLENLIAQLPGEKKNGLFGNLIALSLGLTPNFKSNFDLAEDAKLQLSKDTYDDDLDNLLAQIGDQYADLFLAAKNLSDAILLSDILRVNTEITKAPLSASMIKRYDEHHQDLTLLKALVRQQLPEKYKEIFFDQSKNGYAGYIDGGASQEEFYKFIKPILEKMDGTEELLVKLNREDLLRKQRTFDNGSIPHQIHLGELHAILRRQEDFYPFLKDNREKIEKILTFRIPYYVGPLARGNSRFAWMTRKSEETITPWNFEEVVDKGASAQSFIERMTNFDKNLPNEKVLPKHSLLYEYFTVYNELTKVKYVTEGMRKPAFLSGEQKKAIVDLLFKTNRKVTVKQLKEDYFKKIECFDSVEISGVEDRFNASLGTYHDLLKIIKDKDFLDNEENEDILEDIVLTLTLFEDREMIEERLKTYAHLFDDKVMKQLKRRRYTGWGRLSRKLINGIRDKQSGKTILDFLKSDGFANRNFMQLIHDDSLTFKEDIQKAQVSGQGDSLHEHIANLAGSPAIKKGILQTVKVVDELVKVMGRHKPENIVIEMARENQTTQKGQKNSRERMKRIEEGIKELGSQILKEHPVENTQLQNEKLYLYYLQNGRDMYVDQELDINRLSDYDVDHIVPQSFLKDDSIDNKVLTRSDKNRGKSDNVPSEEVVKKMKNYWRQLLNAKLITQRKFDNLTKAERGGLSELDKAGFIKRQLVETRQITKHVAQILDSRMNTKYDENDKLIREVKVITLKSKLVSDFRKDFQFYKVREINNYHHAHDAYLNAVVGTALIKKYPKLESEFVYGDYKVYDVRKMIAKSEQEIGKATAKYFFYSNIMNFFKTEITLANGEIRKRPLIETNGETGEIVWDKGRDFATVRKVLSMPQVNIVKKTEVQTGGFSKESILPKRNSDKLIARKKDWDPKKYGGFDSPTVAYSVLVVAKVEKGKSKKLKSVKELLGITIMERSSFEKNPIDFLEAKGYKEVKKDLIIKLPKYSLFELENGRKRMLASAGELQKGNELALPSKYVNFLYLASHYEKLKGGSSGSETPGTSESATPESSGSEVEFSHEYWMRHALTLAKRARDEREVPVGAVLVLNNRVIGEGWNRAIGLHDPTAHAEIMALRQGGLVMQNYRLIDATLYVTFEPCVMCAGAMIHSRIGRVVFGVRNAKTGAAGSLMDVLHYPGMNHRVEITEGILADECAALLCYFFRMPRQVFNAQKKAQSSTDSPEDNEQKQLFVEQHKHYLDEIIEQISEFSKRVILADANLDKVLSAYNKHRDKPIREQAENIIHLFTLTNLGAPAAFKYFDTTIDRKRYTSTKEVLDATLIHQSITGLYETRIDLSQLGGD

SEQ ID NO: 269 - protein, 1554 aa, synthetic construct
  REGION 1..1554: note = 107 Cas9 TadAins 1054 polypeptide sequence
MDKKYSIGLAIGTNSVGWAVITDEYKVPSKKFKVLGNTDRHSIKKNLIGALLFDSGETAEATRLKRTARRRYTRRKNRICYLQEIFSNEMAKVDDSFFHRLEESFLVEEDKKHERHPIFGNIVDEVAYHEKYPTIYHLRKKLVDSTDKADLRLIYLALAHMIKFRGHFLIEGDLNPDNSDVDKLFIQLVQTYNQLFEENPINASGVDAKAILSARLSKSRRLENLIAQLPGEKKNGLFGNLIALSLGLTPNFKSNFDLAEDAKLQLSKDTYDDDLDNLLAQIGDQYADLFLAAKNLSDAILLSDILRVNTEITKAPLSASMIKRYDEHHQDLTLLKALVRQQLPEKYKEIFFDQSKNGYAGYIDGGASQEEFYKFIKPILEKMDGTEELLVKLNREDLLRKQRTFDNGSIPHQIHLGELHAILRRQEDFYPFLKDNREKIEKILTFRIPYYVGPLARGNSRFAWMTRKSEETITPWNFEEVVDKGASAQSFIERMTNFDKNLPNEKVLPKHSLLYEYFTVYNELTKVKYVTEGMRKPAFLSGEQKKAIVDLLFKTNRKVTVKQLKEDYFKKIECFDSVEISGVEDRFNASLGTYHDLLKIIKDKDFLDNEENEDILEDIVLTLTLFEDREMIEERLKTYAHLFDDKVMKQLKRRRYTGWGRLSRKLINGIRDKQSGKTILDFLKSDGFANRNFMQLIHDDSLTFKEDIQKAQVSGQGDSLHEHIANLAGSPAIKKGILQTVKVVDELVKVMGRHKPENIVIEMARENQTTQKGQKNSRERMKRIEEGIKELGSQILKEHPVENTQLQNEKLYLYYLQNGRDMYVDQELDINRLSDYDVDHIVPQSFLKDDSIDNKVLTRSDKNRGKSDNVPSEEVVKKMKNYWRQLLNAKLITQRKFDNLTKAERGGLSELDKAGFIKRQLVETRQITKHVAQILDSRMNTKYDENDKLIREVKVITLKSKLVSDFRKDFQFYKVREINNYHHAHDAYLNAVVGTALIKKYPKLESEFVYGDYKVYDVRKMIAKSEQEIGKATAKYFFYSNIMNFFKTEITLANGSSGSETPGTSESATPESSGSEVEFSHEYWMRHALTLAKRARDEREVPVGAVLVLNNRVIGEGWNRAIGLHDPTAHAEIMALRQGGLVMQNYRLIDATLYVTFEPCVMCAGAMIHSRIGRVVFGVRNAKTGAAGSLMDVLHYPGMNHRVEITEGILADECAALLCYFFRMPRQVFNAQKKAQSSTDGEIRKRPLIETNGETGEIVWDKGRDFATVRKVLSMPQVNIVKKTEVQTGGFSKESILPKRNSDKLIARKKDWDPKKYGGFDSPTVAYSVLVVAKVEKGKSKKLKSVKELLGITIMERSSFEKNPIDFLEAKGYKEVKKDLIIKLPKYSLFELENGRKRMLASAGELQKGNELALPSKYVNFLYLASHYEKLKGSPEDNEQKQLFVEQHKHYLDEIIEQISEFSKRVILADANLDKVLSAYNKHRDKPIREQAENIIHLFTLTNLGAPAAFKYFDTTIDRKRYTSTKEVLDATLIHQSITGLYETRIDLSQLGGD

SEQ ID NO: 270 - protein, 1554 aa, synthetic construct
  REGION 1..1554: note = 108 Cas9 TadAins 1026 polypeptide sequence
MDKKYSIGLAIGTNSVGWAVITDEYKVPSKKFKVLGNTDRHSIKKNLIGALLFDSGETAEATRLKRTARRRYTRRKNRICYLQEIFSNEMAKVDDSFFHRLEESFLVEEDKKHERHPIFGNIVDEVAYHEKYPTIYHLRKKLVDSTDKADLRLIYLALAHMIKFRGHFLIEGDLNPDNSDVDKLFIQLVQTYNQLFEENPINASGVDAKAILSARLSKSRRLENLIAQLPGEKKNGLFGNLIALSLGLTPNFKSNFDLAEDAKLQLSKDTYDDDLDNLLAQIGDQYADLFLAAKNLSDAILLSDILRVNTEITKAPLSASMIKRYDEHHQDLTLLKALVRQQLPEKYKEIFFDQSKNGYAGYIDGGASQEEFYKFIKPILEKMDGTEELLVKLNREDLLRKQRTFDNGSIPHQIHLGELHAILRRQEDFYPFLKDNREKIEKILTFRIPYYVGPLARGNSRFAWMTRKSEETITPWNFEEVVDKGASAQSFIERMTNFDKNLPNEKVLPKHSLLYEYFTVYNELTKVKYVTEGMRKPAFLSGEQKKAIVDLLFKTNRKVTVKQLKEDYFKKIECFDSVEISGVEDRFNASLGTYHDLLKIIKDKDFLDNEENEDILEDIVLTLTLFEDREMIEERLKTYAHLFDDKVMKQLKRRRYTGWGRLSRKLINGIRDKQSGKTILDFLKSDGFANRNFMQLIHDDSLTFKEDIQKAQVSGQGDSLHEHIANLAGSPAIKKGILQTVKVVDELVKVMGRHKPENIVIEMARENQTTQKGQKNSRERMKRIEEGIKELGSQILKEHPVENTQLQNEKLYLYYLQNGRDMYVDQELDINRLSDYDVDHIVPQSFLKDDSIDNKVLTRSDKNRGKSDNVPSEEVVKKMKNYWRQLLNAKLITQRKFDNLTKAERGGLSELDKAGFIKRQLVETRQITKHVAQILDSRMNTKYDENDKLIREVKVITLKSKLVSDFRKDFQFYKVREINNYHHAHDAYLNAVVGTALIKKYPKLESEFVYGDYKVYDVRKMIAKSEGSSGSETPGTSESATPESSGSEVEFSHEYWMRHALTLAKRARDEREVPVGAVLVLNNRVIGEGWNRAIGLHDPTAHAEIMALRQGGLVMQNYRLIDATLYVTFEPCVMCAGAMIHSRIGRVVFGVRNAKTGAAGSLMDVLHYPGMNHRVEITEGILADECAALLCYFFRMPRQVFNAQKKAQSSTDQEIGKATAKYFFYSNIMNFFKTEITLANGEIRKRPLIETNGETGEIVWDKGRDFATVRKVLSMPQVNIVKKTEVQTGGFSKESILPKRNSDKLIARKKDWDPKKYGGFDSPTVAYSVLVVAKVEKGKSKKLKSVKELLGITIMERSSFEKNPIDFLEAKGYKEVKKDLIIKLPKYSLFELENGRKRMLASAGELQKGNELALPSKYVNFLYLASHYEKLKGSPEDNEQKQLFVEQHKHYLDEIIEQISEFSKRVILADANLDKVLSAYNKHRDKPIREQAENIIHLFTLTNLGAPAAFKYFDTTIDRKRYTSTKEVLDATLIHQSITGLYETRIDLSQLGGD

SEQ ID NO: 271 - protein, 1540 aa, synthetic construct
  REGION 1..1540: note = 109 Cas9 TadAins 768 polypeptide sequence
MDKKYSIGLAIGTNSVGWAVITDEYKVPSKKFKVLGNTDRHSIKKNLIGALLFDSGETAEATRLKRTARRRYTRRKNRICYLQEIFSNEMAKVDDSFFHRLEESFLVEEDKKHERHPIFGNIVDEVAYHEKYPTIYHLRKKLVDSTDKADLRLIYLALAHMIKFRGHFLIEGDLNPDNSDVDKLFIQLVQTYNQLFEENPINASGVDAKAILSARLSKSRRLENLIAQLPGEKKNGLFGNLIALSLGLTPNFKSNFDLAEDAKLQLSKDTYDDDLDNLLAQIGDQYADLFLAAKNLSDAILLSDILRVNTEITKAPLSASMIKRYDEHHQDLTLLKALVRQQLPEKYKEIFFDQSKNGYAGYIDGGASQEEFYKFIKPILEKMDGTEELLVKLNREDLLRKQRTFDNGSIPHQIHLGELHAILRRQEDFYPFLKDNREKIEKILTFRIPYYVGPLARGNSRFAWMTRKSEETITPWNFEEVVDKGASAQSFIERMTNFDKNLPNEKVLPKHSLLYEYFTVYNELTKVKYVTEGMRKPAFLSGEQKKAIVDLLFKTNRKVTVKQLKEDYFKKIECFDSVEISGVEDRFNASLGTYHDLLKIIKDKDFLDNEENEDILEDIVLTLTLFEDREMIEERLKTYAHLFDDKVMKQLKRRRYTGWGRLSRKLINGIRDKQSGKTILDFLKSDGFANRNFMQLIHDDSLTFKEDIQKAQVSGQGDSLHEHIANLAGSPAIKKGILQTVKVVDELVKVMGRHKPENIVIEMARENQGSSGSETPGTSESATPESSGSEVEFSHEYWMRHALTLAKRARDEREVPVGAVLVLNNRVIGEGWNRAIGLHDPTAHAEIMALRQGGLVMQNYRLIDATLYVTFEPCVMCAGAMIHSRIGRVVFGVRNAKTGAAGSLMDVLHYPGMNHRVEITEGILADECAALLCYFFRMPRTTQKGQKNSRERMKRIEEGIKELGSQILKEHPVENTQLQNEKLYLYYLQNGRDMYVDQELDINRLSDYDVDHIVPQSFLKDDSIDNKVLTRSDKNRGKSDNVPSEEVVKKMKNYWRQLLNAKLITQRKFDNLTKAERGGLSELDKAGFIKRQLVETRQITKHVAQILDSRMNTKYDENDKLIREVKVITLKSKLVSDFRKDFQFYKVREINNYHHAHDAYLNAVVGTALIKKYPKLESEFVYGDYKVYDVRKMIAKSEQEIGKATAKYFFYSNIMNFFKTEITLANGEIRKRPLIETNGETGEIVWDKGRDFATVRKVLSMPQVNIVKKTEVQTGGFSKESILPKRNSDKLIARKKDWDPKKYGGFDSPTVAYSVLVVAKVEKGKSKKLKSVKELLGITIMERSSFEKNPIDFLEAKGYKEVKKDLIIKLPKYSLFELENGRKRMLASAGELQKGNELALPSKYVNFLYLASHYEKLKGSPEDNEQKQLFVEQHKHYLDEIIEQISEFSKRVILADANLDKVLSAYNKHRDKPIREQAENIIHLFTLTNLGAPAAFKYFDTTIDRKRYTSTKEVLDATLIHQSITGLYETRIDLSQLGGD

SEQ ID NO: 272 - protein, 1540 aa, synthetic construct
  REGION 1..1540: note = 110.1 Cas9 TadAins 1250 polypeptide sequence
MDKKYSIGLAIGTNSVGWAVITDEYKVPSKKFKVLGNTDRHSIKKNLIGALLFDSGETAEATRLKRTARRRYTRRKNRICYLQEIFSNEMAKVDDSFFHRLEESFLVEEDKKHERHPIFGNIVDEVAYHEKYPTIYHLRKKLVDSTDKADLRLIYLALAHMIKFRGHFLIEGDLNPDNSDVDKLFIQLVQTYNQLFEENPINASGVDAKAILSARLSKSRRLENLIAQLPGEKKNGLFGNLIALSLGLTPNFKSNFDLAEDAKLQLSKDTYDDDLDNLLAQIGDQYADLFLAAKNLSDAILLSDILRVNTEITKAPLSASMIKRYDEHHQDLTLLKALVRQQLPEKYKEIFFDQSKNGYAGYIDGGASQEEFYKFIKPILEKMDGTEELLVKLNREDLLRKQRTFDNGSIPHQIHLGELHAILRRQEDFYPFLKDNREKIEKILTFRIPYYVGPLARGNSRFAWMTRKSEETITPWNFEEVVDKGASAQSFIERMTNFDKNLPNEKVLPKHSLLYEYFTVYNELTKVKYVTEGMRKPAFLSGEQKKAIVDLLFKTNRKVTVKQLKEDYFKKIECFDSVEISGVEDRFNASLGTYHDLLKIIKDKDFLDNEENEDILEDIVLTLTLFEDREMIEERLKTYAHLFDDKVMKQLKRRRYTGWGRLSRKLINGIRDKQSGKTILDFLKSDGFANRNFMQLIHDDSLTFKEDIQKAQVSGQGDSLHEHIANLAGSPAIKKGILQTVKVVDELVKVMGRHKPENIVIEMARENQTTQKGQKNSRERMKRIEEGIKELGSQILKEHPVENTQLQNEKLYLYYLQNGRDMYVDQELDINRLSDYDVDHIVPQSFLKDDSIDNKVLTRSDKNRGKSDNVPSEEVVKKMKNYWRQLLNAKLITQRKFDNLTKAERGGLSELDKAGFIKRQLVETRQITKHVAQILDSRMNTKYDENDKLIREVKVITLKSKLVSDFRKDFQFYKVREINNYHHAHDAYLNAVVGTALIKKYPKLESEFVYGDYKVYDVRKMIAKSEQEIGKATAKYFFYSNIMNFFKTEITLANGEIRKRPLIETNGETGEIVWDKGRDFATVRKVLSMPQVNIVKKTEVQTGGFSKESILPKRNSDKLIARKKDWDPKKYGGFDSPTVAYSVLVVAKVEKGKSKKLKSVKELLGITIMERSSFEKNPIDFLEAKGYKEVKKDLIIKLPKYSLFELENGRKRMLASAGELQKGNELALPSKYVNFLYLASHYEKLKGSPGSSGSETPGTSESATPESSGSEVEFSHEYWMRHALTLAKRARDEREVPVGAVLVLNNRVIGEGWNRAIGLHDPTAHAEIMALRQGGLVMQNYRLIDATLYVTFEPCVMCAGAMIHSRIGRVVFGVRNAKTGAAGSLMDVLHYPGMNHRVEITEGILADECAALLCYFFRMPREDNEQKQLFVEQHKHYLDEIIEQISEFSKRVILADANLDKVLSAYNKHRDKPIREQAENIIHLFTLTNLGAPAAFKYFDTTIDRKRYTSTKEVLDATLIHQSITGLYETRIDLSQLGGD

SEQ ID NO: 273 - protein, 1543 aa, synthetic construct
  REGION 1..1543: note = 110.2 Cas9 TadAins 1250 polypeptide sequence
MDKKYSIGLAIGTNSVGWAVITDEYKVPSKKFKVLGNTDRHSIKKNLIGALLFDSGETAEATRLKRTARRRYTRRKNRICYLQEIFSNEMAKVDDSFFHRLEESFLVEEDKKHERHPIFGNIVDEVAYHEKYPTIYHLRKKLVDSTDKADLRLIYLALAHMIKFRGHFLIEGDLNPDNSDVDKLFIQLVQTYNQLFEENPINASGVDAKAILSARLSKSRRLENLIAQLPGEKKNGLFGNLIALSLGLTPNFKSNFDLAEDAKLQLSKDTYDDDLDNLLAQIGDQYADLFLAAKNLSDAILLSDILRVNTEITKAPLSASMIKRYDEHHQDLTLLKALVRQQLPEKYKEIFFDQSKNGYAGYIDGGASQEEFYKFIKPILEKMDGTEELLVKLNREDLLRKQRTFDNGSIPHQIHLGELHAILRRQEDFYPFLKDNREKIEKILTFRIPYYVGPLARGNSRFAWMTRKSEETITPWNFEEVVDKGASAQSFIERMTNFDKNLPNEKVLPKHSLLYEYFTVYNELTKVKYVTEGMRKPAFLSGEQKKAIVDLLFKTNRKVTVKQLKEDYFKKIECFDSVEISGVEDRFNASLGTYHDLLKIIKDKDFLDNEENEDILEDIVLTLTLFEDREMIEERLKTYAHLFDDKVMKQLKRRRYTGWGRLSRKLINGIRDKQSGKTILDFLKSDGFANRNFMQLIHDDSLTFKEDIQKAQVSGQGDSLHEHIANLAGSPAIKKGILQTVKVVDELVKVMGRHKPENIVIEMARENQTTQKGQKNSRERMKRIEEGIKELGSQILKEHPVENTQLQNEKLYLYYLQNGRDMYVDQELDINRLSDYDVDHIVPQSFLKDDSIDNKVLTRSDKNRGKSDNVPSEEVVKKMKNYWRQLLNAKLITQRKFDNLTKAERGGLSELDKAGFIKRQLVETRQITKHVAQILDSRMNTKYDENDKLIREVKVITLKSKLVSDFRKDFQFYKVREINNYHHAHDAYLNAVVGTALIKKYPKLESEFVYGDYKVYDVRKMIAKSEQEIGKATAKYFFYSNIMNFFKTEITLANGEIRKRPLIETNGETGEIVWDKGRDFATVRKVLSMPQVNIVKKTEVQTGGFSKESILPKRNSDKLIARKKDWDPKKYGGFDSPTVAYSVLVVAKVEKGKSKKLKSVKELLGITIMERSSFEKNPIDFLEAKGYKEVKKDLIIKLPKYSLFELENGRKRMLASAGELQKGNELALPSKYVNFLYLASHYEKLKGSPGSSGSSGSETPGTSESATPESSGSEVEFSHEYWMRHALTLAKRARDEREVPVGAVLVLNNRVIGEGWNRAIGLHDPTAHAEIMALRQGGLVMQNYRLIDATLYVTFEPCVMCAGAMIHSRIGRVVFGVRNAKTGAAGSLMDVLHYPGMNHRVEITEGILADECAALLCYFFRMPREDNEQKQLFVEQHKHYLDEIIEQISEFSKRVILADANLDKVLSAYNKHRDKPIREQAENIIHLFTLTNLGAPAAFKYFDTTIDRKRYTSTKEVLDATLIHQSITGLYETRIDLSQLGGD

SEQ ID NO: 274 - protein, 1546 aa, synthetic construct
  REGION 1..1546: note = 110.3 Cas9 TadAins 1250 polypeptide sequence
MDKKYSIGLAIGTNSVGWAVITDEYKVPSKKFKVLGNTDRHSIKKNLIGALLFDSGETAEATRLKRTARRRYTRRKNRICYLQEIFSNEMAKVDDSFFHRLEESFLVEEDKKHERHPIFGNIVDEVAYHEKYPTIYHLRKKLVDSTDKADLRLIYLALAHMIKFRGHFLIEGDLNPDNSDVDKLFIQLVQTYNQLFEENPINASGVDAKAILSARLSKSRRLENLIAQLPGEKKNGLFGNLIALSLGLTPNFKSNFDLAEDAKLQLSKDTYDDDLDNLLAQIGDQYADLFLAAKNLSDAILLSDILRVNTEITKAPLSASMIKRYDEHHQDLTLLKALVRQQLPEKYKEIFFDQSKNGYAGYIDGGASQEEFYKFIKPILEKMDGTEELLVKLNREDLLRKQRTFDNGSIPHQIHLGELHAILRRQEDFYPFLKDNREKIEKILTFRIPYYVGPLARGNSRFAWMTRKSEETITPWNFEEVVDKGASAQSFIERMTNFDKNLPNEKVLPKHSLLYEYFTVYNELTKVKYVTEGMRKPAFLSGEQKKAIVDLLFKTNRKVTVKQLKEDYFKKIECFDSVEISGVEDRFNASLGTYHDLLKIIKDKDFLDNEENEDILEDIVLTLTLFEDREMIEERLKTYAHLFDDKVMKQLKRRRYTGWGRLSRKLINGIRDKQSGKTILDFLKSDGFANRNFMQLIHDDSLTFKEDIQKAQVSGQGDSLHEHIANLAGSPAIKKGILQTVKVVDELVKVMGRHKPENIVIEMARENQTTQKGQKNSRERMKRIEEGIKELGSQILKEHPVENTQLQNEKLYLYYLQNGRDMYVDQELDINRLSDYDVDHIVPQSFLKDDSIDNKVLTRSDKNRGKSDNVPSEEVVKKMKNYWRQLLNAKLITQRKFDNLTKAERGGLSELDKAGFIKRQLVETRQITKHVAQILDSRMNTKYDENDKLIREVKVITLKSKLVSDFRKDFQFYKVREINNYHHAHDAYLNAVVGTALIKKYPKLESEFVYGDYKVYDVRKMIAKSEQEIGKATAKYFFYSNIMNFFKTEITLANGEIRKRPLIETNGETGEIVWDKGRDFATVRKVLSMPQVNIVKKTEVQTGGFSKESILPKRNSDKLIARKKDWDPKKYGGFDSPTVAYSVLVVAKVEKGKSKKLKSVKELLGITIMERSSFEKNPIDFLEAKGYKEVKKDLIIKLPKYSLFELENGRKRMLASAGELQKGNELALPSKYVNFLYLASHYEKLKGSPGSSGSSGSETPGTSESATPESGSSSGSEVEFSHEYWMRHALTLAKRARDEREVPVGAVLVLNNRVIGEGWNRAIGLHDPTAHAEIMALRQGGLVMQNYRLIDATLYVTFEPCVMCAGAMIHSRIGRVVFGVRNAKTGAAGSLMDVLHYPGMNHRVEITEGILADECAALLCYFFRMPREDNEQKQLFVEQHKHYLDEIIEQISEFSKRVILADANLDKVLSAYNKHRDKPIREQAENIIHLFTLTNLGAPAAFKYFDTTIDRKRYTSTKEVLDATLIHQSITGLYETRIDLSQLGGD

SEQ ID NO: 275 - protein, 1546 aa, synthetic construct
  REGION 1..1546: note = 110.4 Cas9 TadAins 1250 polypeptide sequence
MDKKYSIGLAIGTNSVGWAVITDEYKVPSKKFKVLGNTDRHSIKKNLIGALLFDSGETAEATRLKRTARRRYTRRKNRICYLQEIFSNEMAKVDDSFFHRLEESFLVEEDKKHERHPIFGNIVDEVAYHEKYPTIYHLRKKLVDSTDKADLRLIYLALAHMIKFRGHFLIEGDLNPDNSDVDKLFIQLVQTYNQLFEENPINASGVDAKAILSARLSKSRRLENLIAQLPGEKKNGLFGNLIALSLGLTPNFKSNFDLAEDAKLQLSKDTYDDDLDNLLAQIGDQYADLFLAAKNLSDAILLSDILRVNTEITKAPLSASMIKRYDEHHQDLTLLKALVRQQLPEKYKEIFFDQSKNGYAGYIDGGASQEEFYKFIKPILEKMDGTEELLVKLNREDLLRKQRTFDNGSIPHQIHLGELHAILRRQEDFYPFLKDNREKIEKILTFRIPYYVGPLARGNSRFAWMTRKSEETITPWNFEEVVDKGASAQSFIERMTNFDKNLPNEKVLPKHSLLYEYFTVYNELTKVKYVTEGMRKPAFLSGEQKKAIVDLLFKTNRKVTVKQLKEDYFKKIECFDSVEISGVEDRFNASLGTYHDLLKIIKDKDFLDNEENEDILEDIVLTLTLFEDREMIEERLKTYAHLFDDKVMKQLKRRRYTGWGRLSRKLINGIRDKQSGKTILDFLKSDGFANRNFMQLIHDDSLTFKEDIQKAQVSGQGDSLHEHIANLAGSPAIKKGILQTVKVVDELVKVMGRHKPENIVIEMARENQTTQKGQKNSRERMKRIEEGIKELGSQILKEHPVENTQLQNEKLYLYYLQNGRDMYVDQELDINRLSDYDVDHIVPQSFLKDDSIDNKVLTRSDKNRGKSDNVPSEEVVKKMKNYWRQLLNAKLITQRKFDNLTKAERGGLSELDKAGFIKRQLVETRQITKHVAQILDSRMNTKYDENDKLIREVKVITLKSKLVSDFRKDFQFYKVREINNYHHAHDAYLNAVVGTALIKKYPKLESEFVYGDYKVYDVRKMIAKSEQEIGKATAKYFFYSNIMNFFKTEITLANGEIRKRPLIETNGETGEIVWDKGRDFATVRKVLSMPQVNIVKKTEVQTGGFSKESILPKRNSDKLIARKKDWDPKKYGGFDSPTVAYSVLVVAKVEKGKSKKLKSVKELLGITIMERSSFEKNPIDFLEAKGYKEVKKDLIIKLPKYSLFELENGRKRMLASAGELQKGNELALPSKYVNFLYLASHYEKLKGSPGSSGSSGSETPGTSESATPESGSSSGSEVEFSHEYWMRHALTLAKRARDEREVPVGAVLVLNNRVIGEGWNRAIGLHDPTAHAEIMALRQGGLVMQNYRLIDATLYVTFEPCVMCAGAMIHSRIGRVVFGVRNAKTGAAGSLMDVLHYPGMNHRVEITEGILADECAALLCYFFRMRREDNEQKQLFVEQHKHYLDEIIEQISEFSKRVILADANLDKVLSAYNKHRDKPIREQAENIIHLFTLTNLGAPAAFKYFDTTIDRKRYTSTKEVLDATLIHQSITGLYETRIDLSQLGGD

SEQ ID NO: 276 - protein, 1546 aa, synthetic construct
  REGION 1..1546: note = 110.5 Cas9 TadAins 1249 polypeptide sequence
MDKKYSIGLAIGTNSVGWAVITDEYKVPSKKFKVLGNTDRHSIKKNLIGALLFDSGETAEATRLKRTARRRYTRRKNRICYLQEIFSNEMAKVDDSFFHRLEESFLVEEDKKHERHPIFGNIVDEVAYHEKYPTIYHLRKKLVDSTDKADLRLIYLALAHMIKFRGHFLIEGDLNPDNSDVDKLFIQLVQTYNQLFEENPINASGVDAKAILSARLSKSRRLENLIAQLPGEKKNGLFGNLIALSLGLTPNFKSNFDLAEDAKLQLSKDTYDDDLDNLLAQIGDQYADLFLAAKNLSDAILLSDILRVNTEITKAPLSASMIKRYDEHHQDLTLLKALVRQQLPEKYKEIFFDQSKNGYAGYIDGGASQEEFYKFIKPILEKMDGTEELLVKLNREDLLRKQRTFDNGSIPHQIHLGELHAILRRQEDFYPFLKDNREKIEKILTFRIPYYVGPLARGNSRFAWMTRKSEETITPWNFEEVVDKGASAQSFIERMTNFDKNLPNEKVLPKHSLLYEYFTVYNELTKVKYVTEGMRKPAFLSGEQKKAIVDLLFKTNRKVTVKQLKEDYFKKIECFDSVEISGVEDRFNASLGTYHDLLKIIKDKDFLDNEENEDILEDIVLTLTLFEDREMIEERLKTYAHLFDDKVMKQLKRRRYTGWGRLSRKLINGIRDKQSGKTILDFLKSDGFANRNFMQLIHDDSLTFKEDIQKAQVSGQGDSLHEHIANLAGSPAIKKGILQTVKVVDELVKVMGRHKPENIVIEMARENQTTQKGQKNSRERMKRIEEGIKELGSQILKEHPVENTQLQNEKLYLYYLQNGRDMYVDQELDINRLSDYDVDHIVPQSFLKDDSIDNKVLTRSDKNRGKSDNVPSEEVVKKMKNYWRQLLNAKLITQRKFDNLTKAERGGLSELDKAGFIKRQLVETRQITKHVAQILDSRMNTKYDENDKLIREVKVITLKSKLVSDFRKDFQFYKVREINNYHHAHDAYLNAVVGTALIKKYPKLESEFVYGDYKVYDVRKMIAKSEQEIGKATAKYFFYSNIMNFFKTEITLANGEIRKRPLIETNGETGEIVWDKGRDFATVRKVLSMPQVNIVKKTEVQTGGFSKESILPKRNSDKLIARKKDWDPKKYGGFDSPTVAYSVLVVAKVEKGKSKKLKSVKELLGITIMERSSFEKNPIDFLEAKGYKEVKKDLIIKLPKYSLFELENGRKRMLASAGELQKGNELALPSKYVNFLYLASHYEKLKGSGSSGSSGSETPGTSESATPESGSSSGSEVEFSHEYWMRHALTLAKRARDEREVPVGAVLVLNNRVIGEGWNRAIGLHDPTAHAEIMALRQGGLVMQNYRLIDATLYVTFEPCVMCAGAMIHSRIGRVVFGVRNAKTGAAGSLMDVLHYPGMNHRVEITEGILADECAALLCYFFRMRRPEDNEQKQLFVEQHKHYLDEIIEQISEFSKRVILADANLDKVLSAYNKHRDKPIREQAENIIHLFTLTNLGAPAAFKYFDTTIDRKRYTSTKEVLDATLIHQSITGLYETRIDLSQLGGD

SEQ ID NO: 277 - protein, 1551 aa, synthetic construct
  REGION 1..1551: note = 110.5 Cas9 TadAins delta59-66 1250 polypeptide sequence
MDKKYSIGLAIGTNSVGWAVITDEYKVPSKKFKVLGNTDRHSIKKNLIGALLFDSGETAEATRLKRTARRRYTRRKNRICYLQEIFSNEMAKVDDSFFHRLEESFLVEEDKKHERHPIFGNIVDEVAYHEKYPTIYHLRKKLVDSTDKADLRLIYLALAHMIKFRGHFLIEGDLNPDNSDVDKLFIQLVQTYNQLFEENPINASGVDAKAILSARLSKSRRLENLIAQLPGEKKNGLFGNLIALSLGLTPNFKSNFDLAEDAKLQLSKDTYDDDLDNLLAQIGDQYADLFLAAKNLSDAILLSDILRVNTEITKAPLSASMIKRYDEHHQDLTLLKALVRQQLPEKYKEIFFDQSKNGYAGYIDGGASQEEFYKFIKPILEKMDGTEELLVKLNREDLLRKQRTFDNGSIPHQIHLGELHAILRRQEDFYPFLKDNREKIEKILTFRIPYYVGPLARGNSRFAWMTRKSEETITPWNFEEVVDKGASAQSFIERMTNFDKNLPNEKVLPKHSLLYEYFTVYNELTKVKYVTEGMRKPAFLSGEQKKAIVDLLFKTNRKVTVKQLKEDYFKKIECFDSVEISGVEDRFNASLGTYHDLLKIIKDKDFLDNEENEDILEDIVLTLTLFEDREMIEERLKTYAHLFDDKVMKQLKRRRYTGWGRLSRKLINGIRDKQSGKTILDFLKSDGFANRNFMQLIHDDSLTFKEDIQKAQVSGQGDSLHEHIANLAGSPAIKKGILQTVKVVDELVKVMGRHKPENIVIEMARENQTTQKGQKNSRERMKRIEEGIKELGSQILKEHPVENTQLQNEKLYLYYLQNGRDMYVDQELDINRLSDYDVDHIVPQSFLKDDSIDNKVLTRSDKNRGKSDNVPSEEVVKKMKNYWRQLLNAKLITQRKFDNLTKAERGGLSELDKAGFIKRQLVETRQITKHVAQILDSRMNTKYDENDKLIREVKVITLKSKLVSDFRKDFQFYKVREINNYHHAHDAYLNAVVGTALIKKYPKLESEFVYGDYKVYDVRKMIAKSEQEIGKATAKYFFYSNIMNFFKTEITLANGEIRKRPLIETNGETGEIVWDKGRDFATVRKVLSMPQVNIVKKTEVQTGGFSKESILPKRNSDKLIARKKDWDPKKYGGFDSPTVAYSVLVVAKVEKGKSKKLKSVKELLGITIMERSSFEKNPIDFLEAKGYKEVKKDLIIKLPKYSLFELENGRKRMLASAGELQKGNELALPSKYVNFLYLASHYEKLKGSPGSSGSSGSETPGTSESATPESGSSGSEVEFSHEYWMRHALTLAKRARDEREVPVGAVLVLNNRVIGEGWNRAHAEIMALRQGGLVMQNYRLIDATLYVTFEPCVMCAGAMIHSRIGRVVFGVRNAKTGAAGSLMDVLHYPGMNHRVEITEGILADECAALLCYFFRMPRQVFNAQKKAQSSTDEDNEQKQLFVEQHKHYLDEIIEQISEFSKRVILADANLDKVLSAYNKHRDKPIREQAENIIHLFTLTNLGAPAAFKYFDTTIDRKRYTSTKEVLDATLIHQSITGLYETRIDLSQLGGD

SEQ ID NO: 278 - protein, 1546 aa, synthetic construct
  REGION 1..1546: note = 110.6 Cas9 TadAins 1251 polypeptide sequence
MDKKYSIGLAIGTNSVGWAVITDEYKVPSKKFKVLGNTDRHSIKKNLIGALLFDSGETAEATRLKRTARRRYTRRKNRICYLQEIFSNEMAKVDDSFFHRLEESFLVEEDKKHERHPIFGNIVDEVAYHEKYPTIYHLRKKLVDSTDKADLRLIYLALAHMIKFRGHFLIEGDLNPDNSDVDKLFIQLVQTYNQLFEENPINASGVDAKAILSARLSKSRRLENLIAQLPGEKKNGLFGNLIALSLGLTPNFKSNFDLAEDAKLQLSKDTYDDDLDNLLAQIGDQYADLFLAAKNLSDAILLSDILRVNTEITKAPLSASMIKRYDEHHQDLTLLKALVRQQLPEKYKEIFFDQSKNGYAGYIDGGASQEEFYKFIKPILEKMDGTEELLVKLNREDLLRKQRTFDNGSIPHQIHLGELHAILRRQEDFYPFLKDNREKIEKILTFRIPYYVGPLARGNSRFAWMTRKSEETITPWNFEEVVDKGASAQSFIERMTNFDKNLPNEKVLPKHSLLYEYFTVYNELTKVKYVTEGMRKPAFLSGEQKKAIVDLLFKTNRKVTVKQLKEDYFKKIECFDSVEISGVEDRFNASLGTYHDLLKIIKDKDFLDNEENEDILEDIVLTLTLFEDREMIEERLKTYAHLFDDKVMKQLKRRRYTGWGRLSRKLINGIRDKQSGKTILDFLKSDGFANRNFMQLIHDDSLTFKEDIQKAQVSGQGDSLHEHIANLAGSPAIKKGILQTVKVVDELVKVMGRHKPENIVIEMARENQTTQKGQKNSRERMKRIEEGIKELGSQILKEHPVENTQLQNEKLYLYYLQNGRDMYVDQELDINRLSDYDVDHIVPQSFLKDDSIDNKVLTRSDKNRGKSDNVPSEEVVKKMKNYWRQLLNAKLITQRKFDNLTKAERGGLSELDKAGFIKRQLVETRQITKHVAQILDSRMNTKYDENDKLIREVKVITLKSKLVSDFRKDFQFYKVREINNYHHAHDAYLNAVVGTALIKKYPKLESEFVYGDYKVYDVRKMIAKSEQEIGKATAKYFFYSNIMNFFKTEITLANGEIRKRPLIETNGETGEIVWDKGRDFATVRKVLSMPQVNIVKKTEVQTGGFSKESILPKRNSDKLIARKKDWDPKKYGGFDSPTVAYSVLVVAKVEKGKSKKLKSVKELLGITIMERSSFEKNPIDFLEAKGYKEVKKDLIIKLPKYSLFELENGRKRMLASAGELQKGNELALPSKYVNFLYLASHYEKLKGSPEGSSGSSGSETPGTSESATPESGSSSGSEVEFSHEYWMRHALTLAKRARDEREVPVGAVLVLNNRVIGEGWNRAIGLHDPTAHAEIMALRQGGLVMQNYRLIDATLYVTFEPCVMCAGAMIHSRIGRVVFGVRNAKTGAAGSLMDVLHYPGMNHRVEITEGILADECAALLCYFFRMRRDNEQKQLFVEQHKHYLDEIIEQISEFSKRVILADANLDKVLSAYNKHRDKPIREQAENIIHLFTLTNLGAPAAFKYFDTTIDRKRYTSTKEVLDATLIHQSITGLYETRIDLSQLGGD

SEQ ID NO: 279 - protein, 1546 aa, synthetic construct
  REGION 1..1546: note = 110.7 Cas9 TadAins 1252 polypeptide sequence
MDKKYSIGLAIGTNSVGWAVITDEYKVPSKKFKVLGNTDRHSIKKNLIGALLFDSGETAEATRLKRTARRRYTRRKNRICYLQEIFSNEMAKVDDSFFHRLEESFLVEEDKKHERHPIFGNIVDEVAYHEKYPTIYHLRKKLVDSTDKADLRLIYLALAHMIKFRGHFLIEGDLNPDNSDVDKLFIQLVQTYNQLFEENPINASGVDAKAILSARLSKSRRLENLIAQLPGEKKNGLFGNLIALSLGLTPNFKSNFDLAEDAKLQLSKDTYDDDLDNLLAQIGDQYADLFLAAKNLSDAILLSDILRVNTEITKAPLSASMIKRYDEHHQDLTLLKALVRQQLPEKYKEIFFDQSKNGYAGYIDGGASQEEFYKFIKPILEKMDGTEELLVKLNREDLLRKQRTFDNGSIPHQIHLGELHAILRRQEDFYPFLKDNREKIEKILTFRIPYYVGPLARGNSRFAWMTRKSEETITPWNFEEVVDKGASAQSFIERMTNFDKNLPNEKVLPKHSLLYEYFTVYNELTKVKYVTEGMRKPAFLSGEQKKAIVDLLFKTNRKVTVKQLKEDYFKKIECFDSVEISGVEDRFNASLGTYHDLLKIIKDKDFLDNEENEDILEDIVLTLTLFEDREMIEERLKTYAHLFDDKVMKQLKRRRYTGWGRLSRKLINGIRDKQSGKTILDFLKSDGFANRNFMQLIHDDSLTFKEDIQKAQVSGQGDSLHEHIANLAGSPAIKKGILQTVKVVDELVKVMGRHKPENIVIEMARENQTTQKGQKNSRERMKRIEEGIKELGSQILKEHPVENTQLQNEKLYLYYLQNGRDMYVDQELDINRLSDYDVDHIVPQSFLKDDSIDNKVLTRSDKNRGKSDNVPSEEVVKKMKNYWRQLLNAKLITQRKFDNLTKAERGGLSELDKAGFIKRQLVETRQITKHVAQILDSRMNTKYDENDKLIREVKVITLKSKLVSDFRKDFQFYKVREINNYHHAHDAYLNAVVGTALIKKYPKLESEFVYGDYKVYDVRKMIAKSEQEIGKATAKYFFYSNIMNFFKTEITLANGEIRKRPLIETNGETGEIVWDKGRDFATVRKVLSMPQVNIVKKTEVQTGGFSKESILPKRNSDKLIARKKDWDPKKYGGFDSPTVAYSVLVVAKVEKGKSKKLKSVKELLGITIMERSSFEKNPIDFLEAKGYKEVKKDLIIKLPKYSLFELENGRKRMLASAGELQKGNELALPSKYVNFLYLASHYEKLKGSPEDGSSGSSGSETPGTSESATPESGSSSGSEVEFSHEYWMRHALTLAKRARDEREVPVGAVLVLNNRVIGEGWNRAIGLHDPTAHAEIMALRQGGLVMQNYRLIDATLYVTFEPCVMCAGAMIHSRIGRVVFGVRNAKTGAAGSLMDVLHYPGMNHRVEITEGILADECAALLCYFFRMRRNEQKQLFVEQHKHYLDEIIEQISEFSKRVILADANLDKVLSAYNKHRDKPIREQAENIIHLFTLTNLGAPAAFKYFDTTIDRKRYTSTKEVLDATLIHQSITGLYETRIDLSQLGGD

SEQ ID NO: 280 - protein, 1533 aa, synthetic construct
  REGION 1..1533: note = 110.8 Cas9 TadAins delta59-66 C-truncate 1250 polypeptide sequence
MDKKYSIGLAIGTNSVGWAVITDEYKVPSKKFKVLGNTDRHSIKKNLIGALLFDSGETAEATRLKRTARRRYTRRKNRICYLQEIFSNEMAKVDDSFFHRLEESFLVEEDKKHERHPIFGNIVDEVAYHEKYPTIYHLRKKLVDSTDKADLRLIYLALAHMIKFRGHFLIEGDLNPDNSDVDKLFIQLVQTYNQLFEENPINASGVDAKAILSARLSKSRRLENLIAQLPGEKKNGLFGNLIALSLGLTPNFKSNFDLAEDAKLQLSKDTYDDDLDNLLAQIGDQYADLFLAAKNLSDAILLSDILRVNTEITKAPLSASMIKRYDEHHQDLTLLKALVRQQLPEKYKEIFFDQSKNGYAGYIDGGASQEEFYKFIKPILEKMDGTEELLVKLNREDLLRKQRTFDNGSIPHQIHLGELHAILRRQEDFYPFLKDNREKIEKILTFRIPYYVGPLARGNSRFAWMTRKSEETITPWNFEEVVDKGASAQSFIERMTNFDKNLPNEKVLPKHSLLYEYFTVYNELTKVKYVTEGMRKPAFLSGEQKKAIVDLLFKTNRKVTVKQLKEDYFKKIECFDSVEISGVEDRFNASLGTYHDLLKIIKDKDFLDNEENEDILEDIVLTLTLFEDREMIEERLKTYAHLFDDKVMKQLKRRRYTGWGRLSRKLINGIRDKQSGKTILDFLKSDGFANRNFMQLIHDDSLTFKEDIQKAQVSGQGDSLHEHIANLAGSPAIKKGILQTVKVVDELVKVMGRHKPENIVIEMARENQTTQKGQKNSRERMKRIEEGIKELGSQILKEHPVENTQLQNEKLYLYYLQNGRDMYVDQELDINRLSDYDVDHIVPQSFLKDDSIDNKVLTRSDKNRGKSDNVPSEEVVKKMKNYWRQLLNAKLITQRKFDNLTKAERGGLSELDKAGFIKRQLVETRQITKHVAQILDSRMNTKYDENDKLIREVKVITLKSKLVSDFRKDFQFYKVREINNYHHAHDAYLNAVVGTALIKKYPKLESEFVYGDYKVYDVRKMIAKSEQEIGKATAKYFFYSNIMNFFKTEITLANGEIRKRPLIETNGETGEIVWDKGRDFATVRKVLSMPQVNIVKKTEVQTGGFSKESILPKRNSDKLIARKKDWDPKKYGGFDSPTVAYSVLVVAKVEKGKSKKLKSVKELLGITIMERSSFEKNPIDFLEAKGYKEVKKDLIIKLPKYSLFELENGRKRMLASAGELQKGNELALPSKYVNFLYLASHYEKLKGSPGSSGSETPGTSESATPESSGSEVEFSHEYWMRHALTLAKRARDEREVPVGAVLVLNNRVIGEGWNRAHAEIMALRQGGLVMQNYRLIDATLYVTFEPCVMCAGAMIHSRIGRVVFGVRNAKTGAAGSLMDVLHYPGMNHRVEITEGILADECAALLCYFFRMPRQEDNEQKQLFVEQHKHYLDEIIEQISEFSKRVILADANLDKVLSAYNKHRDKPIREQAENIIHLFTLTNLGAPAAFKYFDTTIDRKRYTSTKEVLDATLIHQSITGLYETRIDLSQLGGD

SEQ ID NO: 281 - protein, 1549 aa, synthetic construct
  REGION 1..1549: note = 111.1 Cas9 TadAins 997 polypeptide sequence
MDKKYSIGLAIGTNSVGWAVITDEYKVPSKKFKVLGNTDRHSIKKNLIGALLFDSGETAEATRLKRTARRRYTRRKNRICYLQEIFSNEMAKVDDSFFHRLEESFLVEEDKKHERHPIFGNIVDEVAYHEKYPTIYHLRKKLVDSTDKADLRLIYLALAHMIKFRGHFLIEGDLNPDNSDVDKLFIQLVQTYNQLFEENPINASGVDAKAILSARLSKSRRLENLIAQLPGEKKNGLFGNLIALSLGLTPNFKSNFDLAEDAKLQLSKDTYDDDLDNLLAQIGDQYADLFLAAKNLSDAILLSDILRVNTEITKAPLSASMIKRYDEHHQDLTLLKALVRQQLPEKYKEIFFDQSKNGYAGYIDGGASQEEFYKFIKPILEKMDGTEELLVKLNREDLLRKQRTFDNGSIPHQIHLGELHAILRRQEDFYPFLKDNREKIEKILTFRIPYYVGPLARGNSRFAWMTRKSEETITPWNFEEVVDKGASAQSFIERMTNFDKNLPNEKVLPKHSLLYEYFTVYNELTKVKYVTEGMRKPAFLSGEQKKAIVDLLFKTNRKVTVKQLKEDYFKKIECFDSVEISGVEDRFNASLGTYHDLLKIIKDKDFLDNEENEDILEDIVLTLTLFEDREMIEERLKTYAHLFDDKVMKQLKRRRYTGWGRLSRKLINGIRDKQSGKTILDFLKSDGFANRNFMQLIHDDSLTFKEDIQKAQVSGQGDSLHEHIANLAGSPAIKKGILQTVKVVDELVKVMGRHKPENIVIEMARENQTTQKGQKNSRERMKRIEEGIKELGSQILKEHPVENTQLQNEKLYLYYLQNGRDMYVDQELDINRLSDYDVDHIVPQSFLKDDSIDNKVLTRSDKNRGKSDNVPSEEVVKKMKNYWRQLLNAKLITQRKFDNLTKAERGGLSELDKAGFIKRQLVETRQITKHVAQILDSRMNTKYDENDKLIREVKVITLKSKLVSDFRKDFQFYKVREINNYHHAHDAYLNAVVGTALSHEYWMRHALTLAKRARDEREVPVGAVLVLNNRVIGEGWNRAIGLHDPTAHAEIMALRQGGLVMQNYRLIDATLYVTFEPCVMCAGAMIHSRIGRVVFGVRNAKTGAAGSLMDVLHYPGMNHRVEITEGILADECAALLCYFFRMPRQVFNAQKKAQSSTDGSSGSETPGTSESATPESSGIKKYPKLESEFVYGDYKVYDVRKMIAKSEQEIGKATAKYFFYSNIMNFFKTEITLANGEIRKRPLIETNGETGEIVWDKGRDFATVRKVLSMPQVNIVKKTEVQTGGFSKESILPKRNSDKLIARKKDWDPKKYGGFDSPTVAYSVLVVAKVEKGKSKKLKSVKELLGITIMERSSFEKNPIDFLEAKGYKEVKKDLIIKLPKYSLFELENGRKRMLASAGELQKGNELALPSKYVNFLYLASHYEKLKGSPEDNEQKQLFVEQHKHYLDEIIEQISEFSKRVILADANLDKVLSAYNKHRDKPIREQAENIIHLFTLTNLGAPAAFKYFDTTIDRKRYTSTKEVLDATLIHQSITGLYETRIDLSQLGGD

SEQ ID NO: 282 - protein, 1555 aa, synthetic construct
  REGION 1..1555: note = 111.2 Cas9 TadAins 997 polypeptide sequence
MDKKYSIGLAIGTNSVGWAVITDEYKVPSKKFKVLGNTDRHSIKKNLIGALLFDSGETAEATRLKRTARRRYTRRKNRICYLQEIFSNEMAKVDDSFFHRLEESFLVEEDKKHERHPIFGNIVDEVAYHEKYPTIYHLRKKLVDSTDKADLRLIYLALAHMIKFRGHFLIEGDLNPDNSDVDKLFIQLVQTYNQLFEENPINASGVDAKAILSARLSKSRRLENLIAQLPGEKKNGLFGNLIALSLGLTPNFKSNFDLAEDAKLQLSKDTYDDDLDNLLAQIGDQYADLFLAAKNLSDAILLSDILRVNTEITKAPLSASMIKRYDEHHQDLTLLKALVRQQLPEKYKEIFFDQSKNGYAGYIDGGASQEEFYKFIKPILEKMDGTEELLVKLNREDLLRKQRTFDNGSIPHQIHLGELHAILRRQEDFYPFLKDNREKIEKILTFRIPYYVGPLARGNSRFAWMTRKSEETITPWNFEEVVDKGASAQSFIERMTNFDKNLPNEKVLPKHSLLYEYFTVYNELTKVKYVTEGMRKPAFLSGEQKKAIVDLLFKTNRKVTVKQLKEDYFKKIECFDSVEISGVEDRFNASLGTYHDLLKIIKDKDFLDNEENEDILEDIVLTLTLFEDREMIEERLKTYAHLFDDKVMKQLKRRRYTGWGRLSRKLINGIRDKQSGKTILDFLKSDGFANRNFMQLIHDDSLTFKEDIQKAQVSGQGDSLHEHIANLAGSPAIKKGILQTVKVVDELVKVMGRHKPENIVIEMARENQTTQKGQKNSRERMKRIEEGIKELGSQILKEHPVENTQLQNEKLYLYYLQNGRDMYVDQELDINRLSDYDVDHIVPQSFLKDDSIDNKVLTRSDKNRGKSDNVPSEEVVKKMKNYWRQLLNAKLITQRKFDNLTKAERGGLSELDKAGFIKRQLVETRQITKHVAQILDSRMNTKYDENDKLIREVKVITLKSKLVSDFRKDFQFYKVREINNYHHAHDAYLNAVVGTALSHEYWMRHALTLAKRARDEREVPVGAVLVLNNRVIGEGWNRAIGLHDPTAHAEIMALRQGGLVMQNYRLIDATLYVTFEPCVMCAGAMIHSRIGRVVFGVRNAKTGAAGSLMDVLHYPGMNHRVEITEGILADECAALLCYFFRMPRQVFNAQKKAQSSTDGSSGSSGSETPGTSESATPESSGGSSIKKYPKLESEFVYGDYKVYDVRKMIAKSEQEIGKATAKYFFYSNIMNFFKTEITLANGEIRKRPLIETNGETGEIVWDKGRDFATVRKVLSMPQVNIVKKTEVQTGGFSKESILPKRNSDKLIARKKDWDPKKYGGFDSPTVAYSVLVVAKVEKGKSKKLKSVKELLGITIMERSSFEKNPIDFLEAKGYKEVKKDLIIKLPKYSLFELENGRKRMLASAGELQKGNELALPSKYVNFLYLASHYEKLKGSPEDNEQKQLFVEQHKHYLDEIIEQISEFSKRVILADANLDKVLSAYNKHRDKPIREQAENIIHLFTLTNLGAPAAFKYFDTTIDRKRYTSTKEVLDATLIHQSITGLYETRIDLSQLGGD

SEQ ID NO: 283 - protein, 1421 aa, synthetic construct
  REGION 1..1421: note = 112 delta HNH TadA polypeptide sequence
MDKKYSIGLAIGTNSVGWAVITDEYKVPSKKFKVLGNTDRHSIKKNLIGALLFDSGETAEATRLKRTARRRYTRRKNRICYLQEIFSNEMAKVDDSFFHRLEESFLVEEDKKHERHPIFGNIVDEVAYHEKYPTIYHLRKKLVDSTDKADLRLIYLALAHMIKFRGHFLIEGDLNPDNSDVDKLFIQLVQTYNQLFEENPINASGVDAKAILSARLSKSRRLENLIAQLPGEKKNGLFGNLIALSLGLTPNFKSNFDLAEDAKLQLSKDTYDDDLDNLLAQIGDQYADLFLAAKNLSDAILLSDILRVNTEITKAPLSASMIKRYDEHHQDLTLLKALVRQQLPEKYKEIFFDQSKNGYAGYIDGGASQEEFYKFIKPILEKMDGTEELLVKLNREDLLRKQRTFDNGSIPHQIHLGELHAILRRQEDFYPFLKDNREKIEKILTFRIPYYVGPLARGNSRFAWMTRKSEETITPWNFEEVVDKGASAQSFIERMTNFDKNLPNEKVLPKHSLLYEYFTVYNELTKVKYVTEGMRKPAFLSGEQKKAIVDLLFKTNRKVTVKQLKEDYFKKIECFDSVEISGVEDRFNASLGTYHDLLKIIKDKDFLDNEENEDILEDIVLTLTLFEDREMIEERLKTYAHLFDDKVMKQLKRRRYTGWGRLSRKLINGIRDKQSGKTILDFLKSDGFANRNFMQLIHDDSLTFKEDIQKAQVSGQGDSLHEHIANLAGSPAIKKGILQTVKVVDELVKVMGRHKPENIVIEMARENQTTQKGQKNSRERMKRIEEGIKELGSEVEFSHEYWMRHALTLAKRARDEREVPVGAVLVLNNRVIGEGWNRAIGLHDPTAHAEIMALRQGGLVMQNYRLIDATLYVTFEPCVMCAGAMIHSRIGRVVFGVRNAKTGAAGSLMDVLHYPGMNHRVEITEGILADECAALLCYFFRMPRQVFNAQKKAQSSTDGGLSELDKAGFIKRQLVETRQITKHVAQILDSRMNTKYDENDKLIREVKVITLKSKLVSDFRKDFQFYKVREINNYHHAHDAYLNAVVGTALIKKYPKLESEFVYGDYKVYDVRKMIAKSEQEIGKATAKYFFYSNIMNFFKTEITLANGEIRKRPLIETNGETGEIVWDKGRDFATVRKVLSMPQVNIVKKTEVQTGGFSKESILPKRNSDKLIARKKDWDPKKYGGFDSPTVAYSVLVVAKVEKGKSKKLKSVKELLGITIMERSSFEKNPIDFLEAKGYKEVKKDLIIKLPKYSLFELENGRKRMLASAGELQKGNELALPSKYVNFLYLASHYEKLKGSPEDNEQKQLFVEQHKHYLDEIIEQISEFSKRVILADANLDKVLSAYNKHRDKPIREQAENIIHLFTLTNLGAPAAFKYFDTTIDRKRYTSTKEVLDATLIHQSITGLYETRIDLSQLGGD

SEQ ID NO: 284 - protein, 1552 aa, synthetic construct
  REGION 1..1552: note = 113 N-term single TadA helixtrunc 165-end polypeptide sequence
MSEVEFSHEYWMRHALTLAKRARDEREVPVGAVLVLNNRVIGEGWNRAIGLHDPTAHAEIMALRQGGLVMQNYRLIDATLYVTFEPCVMCAGAMIHSRIGRVVFGVRNAKTGAAGSLMDVLHYPGMNHRVEITEGILADECAALLCYFFRMPRSGGSSGGSSGSETPGTSESATPESSGGSSGGSDKKYSIGLAIGTNSVGWAVITDEYKVPSKKFKVLGNTDRHSIKKNLIGALLFDSGETAEATRLKRTARRRYTRRKNRICYLQEIFSNEMAKVDDSFFHRLEESFLVEEDKKHERHPIFGNIVDEVAYHEKYPTIYHLRKKLVDSTDKADLRLIYLALAHMIKFRGHFLIEGDLNPDNSDVDKLFIQLVQTYNQLFEENPINASGVDAKAILSARLSKSRRLENLIAQLPGEKKNGLFGNLIALSLGLTPNFKSNFDLAEDAKLQLSKDTYDDDLDNLLAQIGDQYADLFLAAKNLSDAILLSDILRVNTEITKAPLSASMIKRYDEHHQDLTLLKALVRQQLPEKYKEIFFDQSKNGYAGYIDGGASQEEFYKFIKPILEKMDGTEELLVKLNREDLLRKQRTFDNGSIPHQIHLGELHAILRRQEDFYPFLKDNREKIEKILTFRIPYYVGPLARGNSRFAWMTRKSEETITPWNFEEVVDKGASAQSFIERMTNFDKNLPNEKVLPKHSLLYEYFTVYNELTKVKYVTEGMRKPAFLSGEQKKAIVDLLFKTNRKVTVKQLKEDYFKKIECFDSVEISGVEDRFNASLGTYHDLLKIIKDKDFLDNEENEDILEDIVLTLTLFEDREMIEERLKTYAHLFDDKVMKQLKRRRYTGWGRLSRKLINGIRDKQSGKTILDFLKSDGFANRNFMQLIHDDSLTFKEDIQKAQVSGQGDSLHEHIANLAGSPAIKKGILQTVKVVDELVKVMGRHKPENIVIEMARENQTTQKGQKNSRERMKRIEEGIKELGSQILKEHPVENTQLQNEKLYLYYLQNGRDMYVDQELDINRLSDYDVDHIVPQSFLKDDSIDNKVLTRSDKNRGKSDNVPSEEVVKKMKNYWRQLLNAKLITQRKFDNLTKAERGGLSELDKAGFIKRQLVETRQITKHVAQILDSRMNTKYDENDKLIREVKVITLKSKLVSDFRKDFQFYKVREINNYHHAHDAYLNAVVGTALIKKYPKLESEFVYGDYKVYDVRKMIAKSEQEIGKATAKYFFYSNIMNFFKTEITLANGEIRKRPLIETNGETGEIVWDKGRDFATVRKVLSMPQVNIVKKTEVQTGGFSKESILPKRNSDKLIARKKDWDPKKYGGFDSPTVAYSVLVVAKVEKGKSKKLKSVKELLGITIMERSSFEKNPIDFLEAKGYKEVKKDLIIKLPKYSLFELENGRKRMLASAGELQKGNELALPSKYVNFLYLASHYEKLKGSPEDNEQKQLFVEQHKHYLDEIIEQISEFSKRVILADANLDKVLSAYNKHRDKPIREQAENIIHLFTLTNLGAPAAFKYFDTTIDRKRYTSTKEVLDATLIHQSITGLYETRIDLSQLGGD

SEQ ID NO: 285 - protein, 1545 aa, synthetic construct
  REGION 1..1545: note = 114 N-term single TadA helixtrunc 165-end delta 59-65 polypeptide sequence
MSEVEFSHEYWMRHALTLAKRARDEREVPVGAVLVLNNRVIGEGWNRTAHAEIMALRQGGLVMQNYRLIDATLYVTFEPCVMCAGAMIHSRIGRVVFGVRNAKTGAAGSLMDVLHYPGMNHRVEITEGILADECAALLCYFFRMPRSGGSSGGSSGSETPGTSESATPESSGGSSGGSDKKYSIGLAIGTNSVGWAVITDEYKVPSKKFKVLGNTDRHSIKKNLIGALLFDSGETAEATRLKRTARRRYTRRKNRICYLQEIFSNEMAKVDDSFFHRLEESFLVEEDKKHERHPIFGNIVDEVAYHEKYPTIYHLRKKLVDSTDKADLRLIYLALAHMIKFRGHFLIEGDLNPDNSDVDKLFIQLVQTYNQLFEENPINASGVDAKAILSARLSKSRRLENLIAQLPGEKKNGLFGNLIALSLGLTPNFKSNFDLAEDAKLQLSKDTYDDDLDNLLAQIGDQYADLFLAAKNLSDAILLSDILRVNTEITKAPLSASMIKRYDEHHQDLTLLKALVRQQLPEKYKEIFFDQSKNGYAGYIDGGASQEEFYKFIKPILEKMDGTEELLVKLNREDLLRKQRTFDNGSIPHQIHLGELHAILRRQEDFYPFLKDNREKIEKILTFRIPYYVGPLARGNSRFAWMTRKSEETITPWNFEEVVDKGASAQSFIERMTNFDKNLPNEKVLPKHSLLYEYFTVYNELTKVKYVTEGMRKPAFLSGEQKKAIVDLLFKTNRKVTVKQLKEDYFKKIECFDSVEISGVEDRFNASLGTYHDLLKIIKDKDFLDNEENEDILEDIVLTLTLFEDREMIEERLKTYAHLFDDKVMKQLKRRRYTGWGRLSRKLINGIRDKQSGKTILDFLKSDGFANRNFMQLIHDDSLTFKEDIQKAQVSGQGDSLHEHIANLAGSPAIKKGILQTVKVVDELVKVMGRHKPENIVIEMARENQTTQKGQKNSRERMKRIEEGIKELGSQILKEHPVENTQLQNEKLYLYYLQNGRDMYVDQELDINRLSDYDVDHIVPQSFLKDDSIDNKVLTRSDKNRGKSDNVPSEEVVKKMKNYWRQLLNAKLITQRKFDNLTKAERGGLSELDKAGFIKRQLVETRQITKHVAQILDSRMNTKYDENDKLIREVKVITLKSKLVSDFRKDFQFYKVREINNYHHAHDAYLNAVVGTALIKKYPKLESEFVYGDYKVYDVRKMIAKSEQEIGKATAKYFFYSNIMNFFKTEITLANGEIRKRPLIETNGETGEIVWDKGRDFATVRKVLSMPQVNIVKKTEVQTGGFSKESILPKRNSDKLIARKKDWDPKKYGGFDSPTVAYSVLVVAKVEKGKSKKLKSVKELLGITIMERSSFEKNPIDFLEAKGYKEVKKDLIIKLPKYSLFELENGRKRMLASAGELQKGNELALPSKYVNFLYLASHYEKLKGSPEDNEQKQLFVEQHKHYLDEIIEQISEFSKRVILADANLDKVLSAYNKHRDKPIREQAENIIHLFTLTNLGAPAAFKYFDTTIDRKRYTSTKEVLDATLIHQSITGLYETRIDLSQLGGD

SEQ ID NO: 286 - protein, 1541 aa, synthetic construct
  REGION 1..1541: note = 115.1 Cas9 TadAins 1004 polypeptide sequence
MDKKYSIGLAIGTNSVGWAVITDEYKVPSKKFKVLGNTDRHSIKKNLIGALLFDSGETAEATRLKRTARRRYTRRKNRICYLQEIFSNEMAKVDDSFFHRLEESFLVEEDKKHERHPIFGNIVDEVAYHEKYPTIYHLRKKLVDSTDKADLRLIYLALAHMIKFRGHFLIEGDLNPDNSDVDKLFIQLVQTYNQLFEENPINASGVDAKAILSARLSKSRRLENLIAQLPGEKKNGLFGNLIALSLGLTPNFKSNFDLAEDAKLQLSKDTYDDDLDNLLAQIGDQYADLFLAAKNLSDAILLSDILRVNTEITKAPLSASMIKRYDEHHQDLTLLKALVRQQLPEKYKEIFFDQSKNGYAGYIDGGASQEEFYKFIKPILEKMDGTEELLVKLNREDLLRKQRTFDNGSIPHQIHLGELHAILRRQEDFYPFLKDNREKIEKILTFRIPYYVGPLARGNSRFAWMTRKSEETITPWNFEEVVDKGASAQSFIERMTNFDKNLPNEKVLPKHSLLYEYFTVYNELTKVKYVTEGMRKPAFLSGEQKKAIVDLLFKTNRKVTVKQLKEDYFKKIECFDSVEISGVEDRFNASLGTYHDLLKIIKDKDFLDNEENEDILEDIVLTLTLFEDREMIEERLKTYAHLFDDKVMKQLKRRRYTGWGRLSRKLINGIRDKQSGKTILDFLKSDGFANRNFMQLIHDDSLTFKEDIQKAQVSGQGDSLHEHIANLAGSPAIKKGILQTVKVVDELVKVMGRHKPENIVIEMARENQTTQKGQKNSRERMKRIEEGIKELGSQILKEHPVENTQLQNEKLYLYYLQNGRDMYVDQELDINRLSDYDVDHIVPQSFLKDDSIDNKVLTRSDKNRGKSDNVPSEEVVKKMKNYWRQLLNAKLITQRKFDNLTKAERGGLSELDKAGFIKRQLVETRQITKHVAQILDSRMNTKYDENDKLIREVKVITLKSKLVSDFRKDFQFYKVREINNYHHAHDAYLNAVVGTALIKKYPKGSSGSETPGTSESATPESSGSEVEFSHEYWMRHALTLAKRARDEREVPVGAVLVLNNRVIGEGWNRAIGLHDPTAHAEIMALRQGGLVMQNYRLIDATLYVTFEPCVMCAGAMIHSRIGRVVFGVRNAKTGAAGSLMDVLHYPGMNHRVEITEGILADECAALLCYFFRMPRQLESEFVYGDYKVYDVRKMIAKSEQEIGKATAKYFFYSNIMNFFKTEITLANGEIRKRPLIETNGETGEIVWDKGRDFATVRKVLSMPQVNIVKKTEVQTGGFSKESILPKRNSDKLIARKKDWDPKKYGGFDSPTVAYSVLVVAKVEKGKSKKLKSVKELLGITIMERSSFEKNPIDFLEAKGYKEVKKDLIIKLPKYSLFELENGRKRMLASAGELQKGNELALPSKYVNFLYLASHYEKLKGSPEDNEQKQLFVEQHKHYLDEIIEQISEFSKRVILADANLDKVLSAYNKHRDKPIREQAENIIHLFTLTNLGAPAAFKYFDTTIDRKRYTSTKEVLDATLIHQSITGLYETRIDLSQLGGD

SEQ ID NO: 287 - protein, 1541 aa, synthetic construct
  REGION 1..1541: note = 115.2 Cas9 TadAins 1005 polypeptide sequence
MDKKYSIGLAIGTNSVGWAVITDEYKVPSKKFKVLGNTDRHSIKKNLIGALLFDSGETAEATRLKRTARRRYTRRKNRICYLQEIFSNEMAKVDDSFFHRLEESFLVEEDKKHERHPIFGNIVDEVAYHEKYPTIYHLRKKLVDSTDKADLRLIYLALAHMIKFRGHFLIEGDLNPDNSDVDKLFIQLVQTYNQLFEENPINASGVDAKAILSARLSKSRRLENLIAQLPGEKKNGLFGNLIALSLGLTPNFKSNFDLAEDAKLQLSKDTYDDDLDNLLAQIGDQYADLFLAAKNLSDAILLSDILRVNTEITKAPLSASMIKRYDEHHQDLTLLKALVRQQLPEKYKEIFFDQSKNGYAGYIDGGASQEEFYKFIKPILEKMDGTEELLVKLNREDLLRKQRTFDNGSIPHQIHLGELHAILRRQEDFYPFLKDNREKIEKILTFRIPYYVGPLARGNSRFAWMTRKSEETITPWNFEEVVDKGASAQSFIERMTNFDKNLPNEKVLPKHSLLYEYFTVYNELTKVKYVTEGMRKPAFLSGEQKKAIVDLLFKTNRKVTVKQLKEDYFKKIECFDSVEISGVEDRFNASLGTYHDLLKIIKDKDFLDNEENEDILEDIVLTLTLFEDREMIEERLKTYAHLFDDKVMKQLKRRRYTGWGRLSRKLINGIRDKQSGKTILDFLKSDGFANRNFMQLIHDDSLTFKEDIQKAQVSGQGDSLHEHIANLAGSPAIKKGILQTVKVVDELVKVMGRHKPENIVIEMARENQTTQKGQKNSRERMKRIEEGIKELGSQILKEHPVENTQLQNEKLYLYYLQNGRDMYVDQELDINRLSDYDVDHIVPQSFLKDDSIDNKVLTRSDKNRGKSDNVPSEEVVKKMKNYWRQLLNAKLITQRKFDNLTKAERGGLSELDKAGFIKRQLVETRQITKHVAQILDSRMNTKYDENDKLIREVKVITLKSKLVSDFRKDFQFYKVREINNYHHAHDAYLNAVVGTALIKKYPKLGSSGSETPGTSESATPESSGSEVEFSHEYWMRHALTLAKRARDEREVPVGAVLVLNNRVIGEGWNRAIGLHDPTAHAEIMALRQGGLVMQNYRLIDATLYVTFEPCVMCAGAMIHSRIGRVVFGVRNAKTGAAGSLMDVLHYPGMNHRVEITEGILADECAALLCYFFRMPRQESEFVYGDYKVYDVRKMIAKSEQEIGKATAKYFFYSNIMNFFKTEITLANGEIRKRPLIETNGETGEIVWDKGRDFATVRKVLSMPQVNIVKKTEVQTGGFSKESILPKRNSDKLIARKKDWDPKKYGGFDSPTVAYSVLVVAKVEKGKSKKLKSVKELLGITIMERSSFEKNPIDFLEAKGYKEVKKDLIIKLPKYSLFELENGRKRMLASAGELQKGNELALPSKYVNFLYLASHYEKLKGSPEDNEQKQLFVEQHKHYLDEIIEQISEFSKRVILADANLDKVLSAYNKHRDKPIREQAENIIHLFTLTNLGAPAAFKYFDTTIDRKRYTSTKEVLDATLIHQSITGLYETRIDLSQLGGD

SEQ ID NO: 288 - protein, 1541 aa, synthetic construct
  REGION 1..1541: note = 115.3 Cas9 TadAins 1006 polypeptide sequence
MDKKYSIGLAIGTNSVGWAVITDEYKVPSKKFKVLGNTDRHSIKKNLIGALLFDSGETAEATRLKRTARRRYTRRKNRICYLQEIFSNEMAKVDDSFFHRLEESFLVEEDKKHERHPIFGNIVDEVAYHEKYPTIYHLRKKLVDSTDKADLRLIYLALAHMIKFRGHFLIEGDLNPDNSDVDKLFIQLVQTYNQLFEENPINASGVDAKAILSARLSKSRRLENLIAQLPGEKKNGLFGNLIALSLGLTPNFKSNFDLAEDAKLQLSKDTYDDDLDNLLAQIGDQYADLFLAAKNLSDAILLSDILRVNTEITKAPLSASMIKRYDEHHQDLTLLKALVRQQLPEKYKEIFFDQSKNGYAGYIDGGASQEEFYKFIKPILEKMDGTEELLVKLNREDLLRKQRTFDNGSIPHQIHLGELHAILRRQEDFYPFLKDNREKIEKILTFRIPYYVGPLARGNSRFAWMTRKSEETITPWNFEEVVDKGASAQSFIERMTNFDKNLPNEKVLPKHSLLYEYFTVYNELTKVKYVTEGMRKPAFLSGEQKKAIVDLLFKTNRKVTVKQLKEDYFKKIECFDSVEISGVEDRFNASLGTYHDLLKIIKDKDFLDNEENEDILEDIVLTLTLFEDREMIEERLKTYAHLFDDKVMKQLKRRRYTGWGRLSRKLINGIRDKQSGKTILDFLKSDGFANRNFMQLIHDDSLTFKEDIQKAQVSGQGDSLHEHIANLAGSPAIKKGILQTVKVVDELVKVMGRHKPENIVIEMARENQTTQKGQKNSRERMKRIEEGIKELGSQILKEHPVENTQLQNEKLYLYYLQNGRDMYVDQELDINRLSDYDVDHIVPQSFLKDDSIDNKVLTRSDKNRGKSDNVPSEEVVKKMKNYWRQLLNAKLITQRKFDNLTKAERGGLSELDKAGFIKRQLVETRQITKHVAQILDSRMNTKYDENDKLIREVKVITLKSKLVSDFRKDFQFYKVREINNYHHAHDAYLNAVVGTALIKKYPKLEGSSGSETPGTSESATPESSGSEVEFSHEYWMRHALTLAKRARDEREVPVGAVLVLNNRVIGEGWNRAIGLHDPTAHAEIMALRQGGLVMQNYRLIDATLYVTFEPCVMCAGAMIHSRIGRVVFGVRNAKTGAAGSLMDVLHYPGMNHRVEITEGILADECAALLCYFFRMPRQSEFVYGDYKVYDVRKMIAKSEQEIGKATAKYFFYSNIMNFFKTEITLANGEIRKRPLIETNGETGEIVWDKGRDFATVRKVLSMPQVNIVKKTEVQTGGFSKESILPKRNSDKLIARKKDWDPKKYGGFDSPTVAYSVLVVAKVEKGKSKKLKSVKELLGITIMERSSFEKNPIDFLEAKGYKEVKKDLIIKLPKYSLFELENGRKRMLASAGELQKGNELALPSKYVNFLYLASHYEKLKGSPEDNEQKQLFVEQHKHYLDEIIEQISEFSKRVILADANLDKVLSAYNKHRDKPIREQAENIIHLFTLTNLGAPAAFKYFDTTIDRKRYTSTKEVLDATLIHQSITGLYETRIDLSQLGGD

SEQ ID NO: 289 - protein, 1541 aa, synthetic construct
  REGION 1..1541: note = 115.4 Cas9 TadAins 1007 polypeptide sequence
MDKKYSIGLAIGTNSVGWAVITDEYKVPSKKFKVLGNTDRHSIKKNLIGALLFDSGETAEATRLKRTARRRYTRRKNRICYLQEIFSNEMAKVDDSFFHRLEESFLVEEDKKHERHPIFGNIVDEVAYHEKYPTIYHLRKKLVDSTDKADLRLIYLALAHMIKFRGHFLIEGDLNPDNSDVDKLFIQLVQTYNQLFEENPINASGVDAKAILSARLSKSRRLENLIAQLPGEKKNGLFGNLIALSLGLTPNFKSNFDLAEDAKLQLSKDTYDDDLDNLLAQIGDQYADLFLAAKNLSDAILLSDILRVNTEITKAPLSASMIKRYDEHHQDLTLLKALVRQQLPEKYKEIFFDQSKNGYAGYIDGGASQEEFYKFIKPILEKMDGTEELLVKLNREDLLRKQRTFDNGSIPHQIHLGELHAILRRQEDFYPFLKDNREKIEKILTFRIPYYVGPLARGNSRFAWMTRKSEETITPWNFEEVVDKGASAQSFIERMTNFDKNLPNEKVLPKHSLLYEYFTVYNELTKVKYVTEGMRKPAFLSGEQKKAIVDLLFKTNRKVTVKQLKEDYFKKIECFDSVEISGVEDRFNASLGTYHDLLKIIKDKDFLDNEENEDILEDIVLTLTLFEDREMIEERLKTYAHLFDDKVMKQLKRRRYTGWGRLSRKLINGIRDKQSGKTILDFLKSDGFANRNFMQLIHDDSLTFKEDIQKAQVSGQGDSLHEHIANLAGSPAIKKGILQTVKVVDELVKVMGRHKPENIVIEMARENQTTQKGQKNSRERMKRIEEGIKELGSQILKEHPVENTQLQNEKLYLYYLQNGRDMYVDQELDINRLSDYDVDHIVPQSFLKDDSIDNKVLTRSDKNRGKSDNVPSEEVVKKMKNYWRQLLNAKLITQRKFDNLTKAERGGLSELDKAGFIKRQLVETRQITKHVAQILDSRMNTKYDENDKLIREVKVITLKSKLVSDFRKDFQFYKVREINNYHHAHDAYLNAVVGTALIKKYPKLESGSSGSETPGTSESATPESSGSEVEFSHEYWMRHALTLAKRARDEREVPVGAVLVLNNRVIGEGWNRAIGLHDPTAHAEIMALRQGGLVMQNYRLIDATLYVTFEPCVMCAGAMIHSRIGRVVFGVRNAKTGAAGSLMDVLHYPGMNHRVEITEGILADECAALLCYFFRMPRQEFVYGDYKVYDVRKMIAKSEQEIGKATAKYFFYSNIMNFFKTEITLANGEIRKRPLIETNGETGEIVWDKGRDFATVRKVLSMPQVNIVKKTEVQTGGFSKESILPKRNSDKLIARKKDWDPKKYGGFDSPTVAYSVLVVAKVEKGKSKKLKSVKELLGITIMERSSFEKNPIDFLEAKGYKEVKKDLIIKLPKYSLFELENGRKRMLASAGELQKGNELALPSKYVNFLYLASHYEKLKGSPEDNEQKQLFVEQHKHYLDEIIEQISEFSKRVILADANLDKVLSAYNKHRDKPIREQAENIIHLFTLTNLGAPAAFKYFDTTIDRKRYTSTKEVLDATLIHQSITGLYETRIDLSQLGGD

SEQ ID NO: 290 - protein, 1541 aa, synthetic construct
  REGION 1..1541: note = 116.1 Cas9 TadAins C-term truncate 792 polypeptide sequence
MDKKYSIGLAIGTNSVGWAVITDEYKVPSKKFKVLGNTDRHSIKKNLIGALLFDSGETAEATRLKRTARRRYTRRKNRICYLQEIFSNEMAKVDDSFFHRLEESFLVEEDKKHERHPIFGNIVDEVAYHEKYPTIYHLRKKLVDSTDKADLRLIYLALAHMIKFRGHFLIEGDLNPDNSDVDKLFIQLVQTYNQLFEENPINASGVDAKAILSARLSKSRRLENLIAQLPGEKKNGLFGNLIALSLGLTPNFKSNFDLAEDAKLQLSKDTYDDDLDNLLAQIGDQYADLFLAAKNLSDAILLSDILRVNTEITKAPLSASMIKRYDEHHQDLTLLKALVRQQLPEKYKEIFFDQSKNGYAGYIDGGASQEEFYKFIKPILEKMDGTEELLVKLNREDLLRKQRTFDNGSIPHQIHLGELHAILRRQEDFYPFLKDNREKIEKILTFRIPYYVGPLARGNSRFAWMTRKSEETITPWNFEEVVDKGASAQSFIERMTNFDKNLPNEKVLPKHSLLYEYFTVYNELTKVKYVTEGMRKPAFLSGEQKKAIVDLLFKTNRKVTVKQLKEDYFKKIECFDSVEISGVEDRFNASLGTYHDLLKIIKDKDFLDNEENEDILEDIVLTLTLFEDREMIEERLKTYAHLFDDKVMKQLKRRRYTGWGRLSRKLINGIRDKQSGKTILDFLKSDGFANRNFMQLIHDDSLTFKEDIQKAQVSGQGDSLHEHIANLAGSPAIKKGILQTVKVVDELVKVMGRHKPENIVIEMARENQTTQKGQKNSRERMKRIEEGIKELGGSSGSETPGTSESATPESSGSEVEFSHEYWMRHALTLAKRARDEREVPVGAVLVLNNRVIGEGWNRAIGLHDPTAHAEIMALRQGGLVMQNYRLIDATLYVTFEPCVMCAGAMIHSRIGRVVFGVRNAKTGAAGSLMDVLHYPGMNHRVEITEGILADECAALLCYFFRMPRQSQILKEHPVENTQLQNEKLYLYYLQNGRDMYVDQELDINRLSDYDVDHIVPQSFLKDDSIDNKVLTRSDKNRGKSDNVPSEEVVKKMKNYWRQLLNAKLITQRKFDNLTKAERGGLSELDKAGFIKRQLVETRQITKHVAQILDSRMNTKYDENDKLIREVKVITLKSKLVSDFRKDFQFYKVREINNYHHAHDAYLNAVVGTALIKKYPKLESEFVYGDYKVYDVRKMIAKSEQEIGKATAKYFFYSNIMNFFKTEITLANGEIRKRPLIETNGETGEIVWDKGRDFATVRKVLSMPQVNIVKKTEVQTGGFSKESILPKRNSDKLIARKKDWDPKKYGGFDSPTVAYSVLVVAKVEKGKSKKLKSVKELLGITIMERSSFEKNPIDFLEAKGYKEVKKDLIIKLPKYSLFELENGRKRMLASAGELQKGNELALPSKYVNFLYLASHYEKLKGSPEDNEQKQLFVEQHKHYLDEIIEQISEFSKRVILADANLDKVLSAYNKHRDKPIREQAENIIHLFTLTNLGAPAAFKYFDTTIDRKRYTSTKEVLDATLIHQSITGLYETRIDLSQLGGD

SEQ ID NO: 291 - protein, 1541 aa, synthetic construct
  REGION 1..1541: note = 116.2 Cas9 TadAins C-term truncate 791 polypeptide sequence
MDKKYSIGLAIGTNSVGWAVITDEYKVPSKKFKVLGNTDRHSIKKNLIGALLFDSGETAEATRLKRTARRRYTRRKNRICYLQEIFSNEMAKVDDSFFHRLEESFLVEEDKKHERHPIFGNIVDEVAYHEKYPTIYHLRKKLVDSTDKADLRLIYLALAHMIKFRGHFLIEGDLNPDNSDVDKLFIQLVQTYNQLFEENPINASGVDAKAILSARLSKSRRLENLIAQLPGEKKNGLFGNLIALSLGLTPNFKSNFDLAEDAKLQLSKDTYDDDLDNLLAQIGDQYADLFLAAKNLSDAILLSDILRVNTEITKAPLSASMIKRYDEHHQDLTLLKALVRQQLPEKYKEIFFDQSKNGYAGYIDGGASQEEFYKFIKPILEKMDGTEELLVKLNREDLLRKQRTFDNGSIPHQIHLGELHAILRRQEDFYPFLKDNREKIEKILTFRIPYYVGPLARGNSRFAWMTRKSEETITPWNFEEVVDKGASAQSFIERMTNFDKNLPNEKVLPKHSLLYEYFTVYNELTKVKYVTEGMRKPAFLSGEQKKAIVDLLFKTNRKVTVKQLKEDYFKKIECFDSVEISGVEDRFNASLGTYHDLLKIIKDKDFLDNEENEDILEDIVLTLTLFEDREMIEERLKTYAHLFDDKVMKQLKRRRYTGWGRLSRKLINGIRDKQSGKTILDFLKSDGFANRNFMQLIHDDSLTFKEDIQKAQVSGQGDSLHEHIANLAGSPAIKKGILQTVKVVDELVKVMGRHKPENIVIEMARENQTTQKGQKNSRERMKRIEEGIKELGSSGSETPGTSESATPESSGSEVEFSHEYWMRHALTLAKRARDEREVPVGAVLVLNNRVIGEGWNRAIGLHDPTAHAEIMALRQGGLVMQNYRLIDATLYVTFEPCVMCAGAMIHSRIGRVVFGVRNAKTGAAGSLMDVLHYPGMNHRVEITEGILADECAALLCYFFRMPRQGSQILKEHPVENTQLQNEKLYLYYLQNGRDMYVDQELDINRLSDYDVDHIVPQSFLKDDSIDNKVLTRSDKNRGKSDNVPSEEVVKKMKNYWRQLLNAKLITQRKFDNLTKAERGGLSELDKAGFIKRQLVETRQITKHVAQILDSRMNTKYDENDKLIREVKVITLKSKLVSDFRKDFQFYKVREINNYHHAHDAYLNAVVGTALIKKYPKLESEFVYGDYKVYDVRKMIAKSEQEIGKATAKYFFYSNIMNFFKTEITLANGEIRKRPLIETNGETGEIVWDKGRDFATVRKVLSMPQVNIVKKTEVQTGGFSKESILPKRNSDKLIARKKDWDPKKYGGFDSPTVAYSVLVVAKVEKGKSKKLKSVKELLGITIMERSSFEKNPIDFLEAKGYKEVKKDLIIKLPKYSLFELENGRKRMLASAGELQKGNELALPSKYVNFLYLASHYEKLKGSPEDNEQKQLFVEQHKHYLDEIIEQISEFSKRVILADANLDKVLSAYNKHRDKPIREQAENIIHLFTLTNLGAPAAFKYFDTTIDRKRYTSTKEVLDATLIHQSITGLYETRIDLSQLGGD

SEQ ID NO: 292 - protein, 1541 aa, synthetic construct
  REGION 1..1541: note = 116.3 Cas9 TadAins C-term truncate 790 polypeptide sequence
MDKKYSIGLAIGTNSVGWAVITDEYKVPSKKFKVLGNTDRHSIKKNLIGALLFDSGETAEATRLKRTARRRYTRRKNRICYLQEIFSNEMAKVDDSFFHRLEESFLVEEDKKHERHPIFGNIVDEVAYHEKYPTIYHLRKKLVDSTDKADLRLIYLALAHMIKFRGHFLIEGDLNPDNSDVDKLFIQLVQTYNQLFEENPINASGVDAKAILSARLSKSRRLENLIAQLPGEKKNGLFGNLIALSLGLTPNFKSNFDLAEDAKLQLSKDTYDDDLDNLLAQIGDQYADLFLAAKNLSDAILLSDILRVNTEITKAPLSASMIKRYDEHHQDLTLLKALVRQQLPEKYKEIFFDQSKNGYAGYIDGGASQEEFYKFIKPILEKMDGTEELLVKLNREDLLRKQRTFDNGSIPHQIHLGELHAILRRQEDFYPFLKDNREKIEKILTFRIPYYVGPLARGNSRFAWMTRKSEETITPWNFEEVVDKGASAQSFIERMTNFDKNLPNEKVLPKHSLLYEYFTVYNELTKVKYVTEGMRKPAFLSGEQKKAIVDLLFKTNRKVTVKQLKEDYFKKIECFDSVEISGVEDRFNASLGTYHDLLKIIKDKDFLDNEENEDILEDIVLTLTLFEDREMIEERLKTYAHLFDDKVMKQLKRRRYTGWGRLSRKLINGIRDKQSGKTILDFLKSDGFANRNFMQLIHDDSLTFKEDIQKAQVSGQGDSLHEHIANLAGSPAIKKGILQTVKVVDELVKVMGRHKPENIVIEMARENQTTQKGQKNSRERMKRIEEGIKEGSSGSETPGTSESATPESSGSEVEFSHEYWMRHALTLAKRARDEREVPVGAVLVLNNRVIGEGWNRAIGLHDPTAHAEIMALRQGGLVMQNYRLIDATLYVTFEPCVMCAGAMIHSRIGRVVFGVRNAKTGAAGSLMDVLHYPGMNHRVEITEGILADECAALLCYFFRMPRQLGSQILKEHPVENTQLQNEKLYLYYLQNGRDMYVDQELDINRLSDYDVDHIVPQSFLKDDSIDNKVLTRSDKNRGKSDNVPSEEVVKKMKNYWRQLLNAKLITQRKFDNLTKAERGGLSELDKAGFIKRQLVETRQITKHVAQILDSRMNTKYDENDKLIREVKVITLKSKLVSDFRKDFQFYKVREINNYHHAHDAYLNAVVGTALIKKYPKLESEFVYGDYKVYDVRKMIAKSEQEIGKATAKYFFYSNIMNFFKTEITLANGEIRKRPLIETNGETGEIVWDKGRDFATVRKVLSMPQVNIVKKTEVQTGGFSKESILPKRNSDKLIARKKDWDPKKYGGFDSPTVAYSVLVVAKVEKGKSKKLKSVKELLGITIMERSSFEKNPIDFLEAKGYKEVKKDLIIKLPKYSLFELENGRKRMLASAGELQKGNELALPSKYVNFLYLASHYEKLKGSPEDNEQKQLFVEQHKHYLDEIIEQISEFSKRVILADANLDKVLSAYNKHRDKPIREQAENIIHLFTLTNLGAPAAFKYFDTTIDRKRYTSTKEVLDATLIHQSITGLYETRIDLSQLGGD

SEQ ID NO: 293 - protein, 1484 aa, synthetic construct
  REGION 1..1484: note = 117 Cas9 delta 1017-1069 polypeptide sequence
MDKKYSIGLAIGTNSVGWAVITDEYKVPSKKFKVLGNTDRHSIKKNLIGALLFDSGETAEATRLKRTARRRYTRRKNRICYLQEIFSNEMAKVDDSFFHRLEESFLVEEDKKHERHPIFGNIVDEVAYHEKYPTIYHLRKKLVDSTDKADLRLIYLALAHMIKFRGHFLIEGDLNPDNSDVDKLFIQLVQTYNQLFEENPINASGVDAKAILSARLSKSRRLENLIAQLPGEKKNGLFGNLIALSLGLTPNFKSNFDLAEDAKLQLSKDTYDDDLDNLLAQIGDQYADLFLAAKNLSDAILLSDILRVNTEITKAPLSASMIKRYDEHHQDLTLLKALVRQQLPEKYKEIFFDQSKNGYAGYIDGGASQEEFYKFIKPILEKMDGTEELLVKLNREDLLRKQRTFDNGSIPHQIHLGELHAILRRQEDFYPFLKDNREKIEKILTFRIPYYVGPLARGNSRFAWMTRKSEETITPWNFEEVVDKGASAQSFIERMTNFDKNLPNEKVLPKHSLLYEYFTVYNELTKVKYVTEGMRKPAFLSGEQKKAIVDLLFKTNRKVTVKQLKEDYFKKIECFDSVEISGVEDRFNASLGTYHDLLKIIKDKDFLDNEENEDILEDIVLTLTLFEDREMIEERLKTYAHLFDDKVMKQLKRRRYTGWGRLSRKLINGIRDKQSGKTILDFLKSDGFANRNFMQLIHDDSLTFKEDIQKAQVSGQGDSLHEHIANLAGSPAIKKGILQTVKVVDELVKVMGRHKPENIVIEMARENQTTQKGQKNSRERMKRIEEGIKELGSQILKEHPVENTQLQNEKLYLYYLQNGRDMYVDQELDINRLSDYDVDHIVPQSFLKDDSIDNKVLTRSDKNRGKSDNVPSEEVVKKMKNYWRQLLNAKLITQRKFDNLTKAERGGLSELDKAGFIKRQLVETRQITKHVAQILDSRMNTKYDENDKLIREVKVITLKSKLVSDFRKDFQFYKVREINNYHHAHDAYLNAVVGTALIKKYPKLESEFVYGDYKVYSSGSEVEFSHEYWMRHALTLAKRARDEREVPVGAVLVLNNRVIGEGWNRAIGLHDPTAHAEIMALRQGGLVMQNYRLIDATLYVTFEPCVMCAGAMIHSRIGRVVFGVRNAKTGAAGSLMDVLHYPGMNHRVEITEGILADECAALLCYFFRMPRQVFNAQKKAQSSTDGEIVWDKGRDFATVRKVLSMPQVNIVKKTEVQTGGFSKESILPKRNSDKLIARKKDWDPKKYGGFDSPTVAYSVLVVAKVEKGKSKKLKSVKELLGITIMERSSFEKNPIDFLEAKGYKEVKKDLIIKLPKYSLFELENGRKRMLASAGELQKGNELALPSKYVNFLYLASHYEKLKGSPEDNEQKQLFVEQHKHYLDEIIEQISEFSKRVILADANLDKVLSAYNKHRDKPIREQAENIIHLFTLTNLGAPAAFKYFDTTIDRKRYTSTKEVLDATLIHQSITGLYETRIDLSQLGGD

SEQ ID NO: 294 - protein, 1554 aa, synthetic construct
  REGION 1..1554: note = 118 Cas9 TadA-CP116ins 1067 polypeptide sequence
MDKKYSIGLAIGTNSVGWAVITDEYKVPSKKFKVLGNTDRHSIKKNLIGALLFDSGETAEATRLKRTARRRYTRRKNRICYLQEIFSNEMAKVDDSFFHRLEESFLVEEDKKHERHPIFGNIVDEVAYHEKYPTIYHLRKKLVDSTDKADLRLIYLALAHMIKFRGHFLIEGDLNPDNSDVDKLFIQLVQTYNQLFEENPINASGVDAKAILSARLSKSRRLENLIAQLPGEKKNGLFGNLIALSLGLTPNFKSNFDLAEDAKLQLSKDTYDDDLDNLLAQIGDQYADLFLAAKNLSDAILLSDILRVNTEITKAPLSASMIKRYDEHHQDLTLLKALVRQQLPEKYKEIFFDQSKNGYAGYIDGGASQEEFYKFIKPILEKMDGTEELLVKLNREDLLRKQRTFDNGSIPHQIHLGELHAILRRQEDFYPFLKDNREKIEKILTFRIPYYVGPLARGNSRFAWMTRKSEETITPWNFEEVVDKGASAQSFIERMTNFDKNLPNEKVLPKHSLLYEYFTVYNELTKVKYVTEGMRKPAFLSGEQKKAIVDLLFKTNRKVTVKQLKEDYFKKIECFDSVEISGVEDRFNASLGTYHDLLKIIKDKDFLDNEENEDILEDIVLTLTLFEDREMIEERLKTYAHLFDDKVMKQLKRRRYTGWGRLSRKLINGIRDKQSGKTILDFLKSDGFANRNFMQLIHDDSLTFKEDIQKAQVSGQGDSLHEHIANLAGSPAIKKGILQTVKVVDELVKVMGRHKPENIVIEMARENQTTQKGQKNSRERMKRIEEGIKELGSQILKEHPVENTQLQNEKLYLYYLQNGRDMYVDQELDINRLSDYDVDHIVPQSFLKDDSIDNKVLTRSDKNRGKSDNVPSEEVVKKMKNYWRQLLNAKLITQRKFDNLTKAERGGLSELDKAGFIKRQLVETRQITKHVAQILDSRMNTKYDENDKLIREVKVITLKSKLVSDFRKDFQFYKVREINNYHHAHDAYLNAVVGTALIKKYPKLESEFVYGDYKVYDVRKMIAKSEQEIGKATAKYFFYSNIMNFFKTEITLANGEIRKRPLIETNMNHRVEITEGILADECAALLCYFFRMPRQVFNAQKKAQSSTDGSSGSETPGTSESATPESSGSEVEFSHEYWMRHALTLAKRARDEREVPVGAVLVLNNRVIGEGWNRAIGLHDPTAHAEIMALRQGGLVMQNYRLIDATLYVTFEPCVMCAGAMIHSRIGRVVFGVRNAKTGAAGSLMDVLHYPGGETGEIVWDKGRDFATVRKVLSMPQVNIVKKTEVQTGGFSKESILPKRNSDKLIARKKDWDPKKYGGFDSPTVAYSVLVVAKVEKGKSKKLKSVKELLGITIMERSSFEKNPIDFLEAKGYKEVKKDLIIKLPKYSLFELENGRKRMLASAGELQKGNELALPSKYVNFLYLASHYEKLKGSPEDNEQKQLFVEQHKHYLDEIIEQISEFSKRVILADANLDKVLSAYNKHRDKPIREQAENIIHLFTLTNLGAPAAFKYFDTTIDRKRYTSTKEVLDATLIHQSITGLYETRIDLSQLGGD

SEQ ID NO: 295 - protein, 1554 aa, synthetic construct
  REGION 1..1554: note = 119 Cas9 TadAins 701 polypeptide sequence
MDKKYSIGLAIGTNSVGWAVITDEYKVPSKKFKVLGNTDRHSIKKNLIGALLFDSGETAEATRLKRTARRRYTRRKNRICYLQEIFSNEMAKVDDSFFHRLEESFLVEEDKKHERHPIFGNIVDEVAYHEKYPTIYHLRKKLVDSTDKADLRLIYLALAHMIKFRGHFLIEGDLNPDNSDVDKLFIQLVQTYNQLFEENPINASGVDAKAILSARLSKSRRLENLIAQLPGEKKNGLFGNLIALSLGLTPNFKSNFDLAEDAKLQLSKDTYDDDLDNLLAQIGDQYADLFLAAKNLSDAILLSDILRVNTEITKAPLSASMIKRYDEHHQDLTLLKALVRQQLPEKYKEIFFDQSKNGYAGYIDGGASQEEFYKFIKPILEKMDGTEELLVKLNREDLLRKQRTFDNGSIPHQIHLGELHAILRRQEDFYPFLKDNREKIEKILTFRIPYYVGPLARGNSRFAWMTRKSEETITPWNFEEVVDKGASAQSFIERMTNFDKNLPNEKVLPKHSLLYEYFTVYNELTKVKYVTEGMRKPAFLSGEQKKAIVDLLFKTNRKVTVKQLKEDYFKKIECFDSVEISGVEDRFNASLGTYHDLLKIIKDKDFLDNEENEDILEDIVLTLTLFEDREMIEERLKTYAHLFDDKVMKQLKRRRYTGWGRLSRKLINGIRDKQSGKTILDFLKSDGFANRNFMQLIHDDSGSSGSETPGTSESATPESSGSEVEFSHEYWMRHALTLAKRARDEREVPVGAVLVLNNRVIGEGWNRAIGLHDPTAHAEIMALRQGGLVMQNYRLIDATLYVTFEPCVMCAGAMIHSRIGRVVFGVRNAKTGAAGSLMDVLHYPGMNHRVEITEGILADECAALLCYFFRMPRQVFNAQKKAQSSTDLTFKEDIQKAQVSGQGDSLHEHIANLAGSPAIKKGILQTVKVVDELVKVMGRHKPENIVIEMARENQTTQKGQKNSRERMKRIEEGIKELGSQILKEHPVENTQLQNEKLYLYYLQNGRDMYVDQELDINRLSDYDVDHIVPQSFLKDDSIDNKVLTRSDKNRGKSDNVPSEEVVKKMKNYWRQLLNAKLITQRKFDNLTKAERGGLSELDKAGFIKRQLVETRQITKHVAQILDSRMNTKYDENDKLIREVKVITLKSKLVSDFRKDFQFYKVREINNYHHAHDAYLNAVVGTALIKKYPKLESEFVYGDYKVYDVRKMIAKSEQEIGKATAKYFFYSNIMNFFKTEITLANGEIRKRPLIETNGETGEIVWDKGRDFATVRKVLSMPQVNIVKKTEVQTGGFSKESILPKRNSDKLIARKKDWDPKKYGGFDSPTVAYSVLVVAKVEKGKSKKLKSVKELLGITIMERSSFEKNPIDFLEAKGYKEVKKDLIIKLPKYSLFELENGRKRMLASAGELQKGNELALPSKYVNFLYLASHYEKLKGSPEDNEQKQLFVEQHKHYLDEIIEQISEFSKRVILADANLDKVLSAYNKHRDKPIREQAENIIHLFTLTNLGAPAAFKYFDTTIDRKRYTSTKEVLDATLIHQSITGLYETRIDLSQLGGD

SEQ ID NO: 296 - protein, 1554 aa, synthetic construct
  REGION 1..1554: note = 120 Cas9 TadACP136ins 1248 polypeptide sequence
MDKKYSIGLAIGTNSVGWAVITDEYKVPSKKFKVLGNTDRHSIKKNLIGALLFDSGETAEATRLKRTARRRYTRRKNRICYLQEIFSNEMAKVDDSFFHRLEESFLVEEDKKHERHPIFGNIVDEVAYHEKYPTIYHLRKKLVDSTDKADLRLIYLALAHMIKFRGHFLIEGDLNPDNSDVDKLFIQLVQTYNQLFEENPINASGVDAKAILSARLSKSRRLENLIAQLPGEKKNGLFGNLIALSLGLTPNFKSNFDLAEDAKLQLSKDTYDDDLDNLLAQIGDQYADLFLAAKNLSDAILLSDILRVNTEITKAPLSASMIKRYDEHHQDLTLLKALVRQQLPEKYKEIFFDQSKNGYAGYIDGGASQEEFYKFIKPILEKMDGTEELLVKLNREDLLRKQRTFDNGSIPHQIHLGELHAILRRQEDFYPFLKDNREKIEKILTFRIPYYVGPLARGNSRFAWMTRKSEETITPWNFEEVVDKGASAQSFIERMTNFDKNLPNEKVLPKHSLLYEYFTVYNELTKVKYVTEGMRKPAFLSGEQKKAIVDLLFKTNRKVTVKQLKEDYFKKIECFDSVEISGVEDRFNASLGTYHDLLKIIKDKDFLDNEENEDILEDIVLTLTLFEDREMIEERLKTYAHLFDDKVMKQLKRRRYTGWGRLSRKLINGIRDKQSGKTILDFLKSDGFANRNFMQLIHDDSLTFKEDIQKAQVSGQGDSLHEHIANLAGSPAIKKGILQTVKVVDELVKVMGRHKPENIVIEMARENQTTQKGQKNSRERMKRIEEGIKELGSQILKEHPVENTQLQNEKLYLYYLQNGRDMYVDQELDINRLSDYDVDHIVPQSFLKDDSIDNKVLTRSDKNRGKSDNVPSEEVVKKMKNYWRQLLNAKLITQRKFDNLTKAERGGLSELDKAGFIKRQLVETRQITKHVAQILDSRMNTKYDENDKLIREVKVITLKSKLVSDFRKDFQFYKVREINNYHHAHDAYLNAVVGTALIKKYPKLESEFVYGDYKVYDVRKMIAKSEQEIGKATAKYFFYSNIMNFFKTEITLANGEIRKRPLIETNGETGEIVWDKGRDFATVRKVLSMPQVNIVKKTEVQTGGFSKESILPKRNSDKLIARKKDWDPKKYGGFDSPTVAYSVLVVAKVEKGKSKKLKSVKELLGITIMERSSFEKNPIDFLEAKGYKEVKKDLIIKLPKYSLFELENGRKRMLASAGELQKGNELALPSKYVNFLYLASHYEKLKGSMNHRVEITEGILADECAALLCYFFRMPRQVFNAQKKAQSSTDGSSGSETPGTSESATPESSGSEVEFSHEYWMRHALTLAKRARDEREVPVGAVLVLNNRVIGEGWNRAIGLHDPTAHAEIMALRQGGLVMQNYRLIDATLYVTFEPCVMCAGAMIHSRIGRVVFGVRNAKTGAAGSLMDVLHYPGPEDNEQKQLFVEQHKHYLDEIIEQISEFSKRVILADANLDKVLSAYNKHRDKPIREQAENIIHLFTLTNLGAPAAFKYFDTTIDRKRYTSTKEVLDATLIHQSITGLYETRIDLSQLGGD

SEQ ID NO: 297 - protein, 1554 aa, synthetic construct
  REGION 1..1554: note = 121 Cas9 TadACP136ins 1052 polypeptide sequence
MDKKYSIGLAIGTNSVGWAVITDEYKVPSKKFKVLGNTDRHSIKKNLIGALLFDSGETAEATRLKRTARRRYTRRKNRICYLQEIFSNEMAKVDDSFFHRLEESFLVEEDKKHERHPIFGNIVDEVAYHEKYPTIYHLRKKLVDSTDKADLRLIYLALAHMIKFRGHFLIEGDLNPDNSDVDKLFIQLVQTYNQLFEENPINASGVDAKAILSARLSKSRRLENLIAQLPGEKKNGLFGNLIALSLGLTPNFKSNFDLAEDAKLQLSKDTYDDDLDNLLAQIGDQYADLFLAAKNLSDAILLSDILRVNTEITKAPLSASMIKRYDEHHQDLTLLKALVRQQLPEKYKEIFFDQSKNGYAGYIDGGASQEEFYKFIKPILEKMDGTEELLVKLNREDLLRKQRTFDNGSIPHQIHLGELHAILRRQEDFYPFLKDNREKIEKILTFRIPYYVGPLARGNSRFAWMTRKSEETITPWNFEEVVDKGASAQSFIERMTNFDKNLPNEKVLPKHSLLYEYFTVYNELTKVKYVTEGMRKPAFLSGEQKKAIVDLLFKTNRKVTVKQLKEDYFKKIECFDSVEISGVEDRFNASLGTYHDLLKIIKDKDFLDNEENEDILEDIVLTLTLFEDREMIEERLKTYAHLFDDKVMKQLKRRRYTGWGRLSRKLINGIRDKQSGKTILDFLKSDGFANRNFMQLIHDDSLTFKEDIQKAQVSGQGDSLHEHIANLAGSPAIKKGILQTVKVVDELVKVMGRHKPENIVIEMARENQTTQKGQKNSRERMKRIEEGIKELGSQILKEHPVENTQLQNEKLYLYYLQNGRDMYVDQELDINRLSDYDVDHIVPQSFLKDDSIDNKVLTRSDKNRGKSDNVPSEEVVKKMKNYWRQLLNAKLITQRKFDNLTKAERGGLSELDKAGFIKRQLVETRQITKHVAQILDSRMNTKYDENDKLIREVKVITLKSKLVSDFRKDFQFYKVREINNYHHAHDAYLNAVVGTALIKKYPKLESEFVYGDYKVYDVRKMIAKSEQEIGKATAKYFFYSNIMNFFKTEITLAMNHRVEITEGILADECAALLCYFFRMPRQVFNAQKKAQSSTDGSSGSETPGTSESATPESSGSEVEFSHEYWMRHALTLAKRARDEREVPVGAVLVLNNRVIGEGWNRAIGLHDPTAHAEIMALRQGGLVMQNYRLIDATLYVTFEPCVMCAGAMIHSRIGRVVFGVRNAKTGAAGSLMDVLHYPGNGEIRKRPLIETNGETGEIVWDKGRDFATVRKVLSMPQVNIVKKTEVQTGGFSKESILPKRNSDKLIARKKDWDPKKYGGFDSPTVAYSVLVVAKVEKGKSKKLKSVKELLGITIMERSSFEKNPIDFLEAKGYKEVKKDLIIKLPKYSLFELENGRKRMLASAGELQKGNELALPSKYVNFLYLASHYEKLKGSPEDNEQKQLFVEQHKHYLDEIIEQISEFSKRVILADANLDKVLSAYNKHRDKPIREQAENIIHLFTLTNLGAPAAFKYFDTTIDRKRYTSTKEVLDATLIHQSITGLYETRIDLSQLGGD

SEQ ID NO: 298 - protein, 1554 aa, synthetic construct
  REGION 1..1554: note = 122 Cas9 TadACP136ins 1041 polypeptide sequence
MDKKYSIGLAIGTNSVGWAVITDEYKVPSKKFKVLGNTDRHSIKKNLIGALLFDSGETAEATRLKRTARRRYTRRKNRICYLQEIFSNEMAKVDDSFFHRLEESFLVEEDKKHERHPIFGNIVDEVAYHEKYPTIYHLRKKLVDSTDKADLRLIYLALAHMIKFRGHFLIEGDLNPDNSDVDKLFIQLVQTYNQLFEENPINASGVDAKAILSARLSKSRRLENLIAQLPGEKKNGLFGNLIALSLGLTPNFKSNFDLAEDAKLQLSKDTYDDDLDNLLAQIGDQYADLFLAAKNLSDAILLSDILRVNTEITKAPLSASMIKRYDEHHQDLTLLKALVRQQLPEKYKEIFFDQSKNGYAGYIDGGASQEEFYKFIKPILEKMDGTEELLVKLNREDLLRKQRTFDNGSIPHQIHLGELHAILRRQEDFYPFLKDNREKIEKILTFRIPYYVGPLARGNSRFAWMTRKSEETITPWNFEEVVDKGASAQSFIERMTNFDKNLPNEKVLPKHSLLYEYFTVYNELTKVKYVTEGMRKPAFLSGEQKKAIVDLLFKTNRKVTVKQLKEDYFKKIECFDSVEISGVEDRFNASLGTYHDLLKIIKDKDFLDNEENEDILEDIVLTLTLFEDREMIEERLKTYAHLFDDKVMKQLKRRRYTGWGRLSRKLINGIRDKQSGKTILDFLKSDGFANRNFMQLIHDDSLTFKEDIQKAQVSGQGDSLHEHIANLAGSPAIKKGILQTVKVVDELVKVMGRHKPENIVIEMARENQTTQKGQKNSRERMKRIEEGIKELGSQILKEHPVENTQLQNEKLYLYYLQNGRDMYVDQELDINRLSDYDVDHIVPQSFLKDDSIDNKVLTRSDKNRGKSDNVPSEEVVKKMKNYWRQLLNAKLITQRKFDNLTKAERGGLSELDKAGFIKRQLVETRQITKHVAQILDSRMNTKYDENDKLIREVKVITLKSKLVSDFRKDFQFYKVREINNYHHAHDAYLNAVVGTALIKKYPKLESEFVYGDYKVYDVRKMIAKSEQEIGKATAKYFFYSMNHRVEITEGILADECAALLCYFFRMPRQVFNAQKKAQSSTDGSSGSETPGTSESATPESSGSEVEFSHEYWMRHALTLAKRARDEREVPVGAVLVLNNRVIGEGWNRAIGLHDPTAHAEIMALRQGGLVMQNYRLIDATLYVTFEPCVMCAGAMIHSRIGRVVFGVRNAKTGAAGSLMDVLHYPGNIMNFFKTEITLANGEIRKRPLIETNGETGEIVWDKGRDFATVRKVLSMPQVNIVKKTEVQTGGFSKESILPKRNSDKLIARKKDWDPKKYGGFDSPTVAYSVLVVAKVEKGKSKKLKSVKELLGITIMERSSFEKNPIDFLEAKGYKEVKKDLIIKLPKYSLFELENGRKRMLASAGELQKGNELALPSKYVNFLYLASHYEKLKGSPEDNEQKQLFVEQHKHYLDEIIEQISEFSKRVILADANLDKVLSAYNKHRDKPIREQAENIIHLFTLTNLGAPAAFKYFDTTIDRKRYTSTKEVLDATLIHQSITGLYETRIDLSQLGGD

SEQ ID NO: 299 - protein, 1554 aa, synthetic construct
  REGION 1..1554: note = 123 Cas9 TadACP139ins 1299 polypeptide sequence
MDKKYSIGLAIGTNSVGWAVITDEYKVPSKKFKVLGNTDRHSIKKNLIGALLFDSGETAEATRLKRTARRRYTRRKNRICYLQEIFSNEMAKVDDSFFHRLEESFLVEEDKKHERHPIFGNIVDEVAYHEKYPTIYHLRKKLVDSTDKADLRLIYLALAHMIKFRGHFLIEGDLNPDNSDVDKLFIQLVQTYNQLFEENPINASGVDAKAILSARLSKSRRLENLIAQLPGEKKNGLFGNLIALSLGLTPNFKSNFDLAEDAKLQLSKDTYDDDLDNLLAQIGDQYADLFLAAKNLSDAILLSDILRVNTEITKAPLSASMIKRYDEHHQDLTLLKALVRQQLPEKYKEIFFDQSKNGYAGYIDGGASQEEFYKFIKPILEKMDGTEELLVKLNREDLLRKQRTFDNGSIPHQIHLGELHAILRRQEDFYPFLKDNREKIEKILTFRIPYYVGPLARGNSRFAWMTRKSEETITPWNFEEVVDKGASAQSFIERMTNFDKNLPNEKVLPKHSLLYEYFTVYNELTKVKYVTEGMRKPAFLSGEQKKAIVDLLFKTNRKVTVKQLKEDYFKKIECFDSVEISGVEDRFNASLGTYHDLLKIIKDKDFLDNEENEDILEDIVLTLTLFEDREMIEERLKTYAHLFDDKVMKQLKRRRYTGWGRLSRKLINGIRDKQSGKTILDFLKSDGFANRNFMQLIHDDSLTFKEDIQKAQVSGQGDSLHEHIANLAGSPAIKKGILQTVKVVDELVKVMGRHKPENIVIEMARENQTTQKGQKNSRERMKRIEEGIKELGSQILKEHPVENTQLQNEKLYLYYLQNGRDMYVDQELDINRLSDYDVDHIVPQSFLKDDSIDNKVLTRSDKNRGKSDNVPSEEVVKKMKNYWRQLLNAKLITQRKFDNLTKAERGGLSELDKAGFIKRQLVETRQITKHVAQILDSRMNTKYDENDKLIREVKVITLKSKLVSDFRKDFQFYKVREINNYHHAHDAYLNAVVGTALIKKYPKLESEFVYGDYKVYDVRKMIAKSEQEIGKATAKYFFYSNIMNFFKTEITLANGEIRKRPLIETNGETGEIVWDKGRDFATVRKVLSMPQVNIVKKTEVQTGGFSKESILPKRNSDKLIARKKDWDPKKYGGFDSPTVAYSVLVVAKVEKGKSKKLKSVKELLGITIMERSSFEKNPIDFLEAKGYKEVKKDLIIKLPKYSLFELENGRKRMLASAGELQKGNELALPSKYVNFLYLASHYEKLKGSPEDNEQKQLFVEQHKHYLDEIIEQISEFSKRVILADANLDKVLSAYNKHRMNHRVEITEGILADECAALLCYFFRMPRQVFNAQKKAQSSTDGSSGSETPGTSESATPESSGSEVEFSHEYWMRHALTLAKRARDEREVPVGAVLVLNNRVIGEGWNRAIGLHDPTAHAEIMALRQGGLVMQNYRLIDATLYVTFEPCVMCAGAMIHSRIGRVVFGVRNAKTGAAGSLMDVLHYPGDKPIREQAENIIHLFTLTNLGAPAAFKYFDTTIDRKRYTSTKEVLDATLIHQSITGLYETRIDLSQLGGD

SEQ ID NO: 300 - protein, 1454 aa, synthetic construct
  REGION 1..1454: note = 124 Cas9 delta 792-872TadAins polypeptide sequence
MDKKYSIGLAIGTNSVGWAVITDEYKVPSKKFKVLGNTDRHSIKKNLIGALLFDSGETAEATRLKRTARRRYTRRKNRICYLQEIFSNEMAKVDDSFFHRLEESFLVEEDKKHERHPIFGNIVDEVAYHEKYPTIYHLRKKLVDSTDKADLRLIYLALAHMIKFRGHFLIEGDLNPDNSDVDKLFIQLVQTYNQLFEENPINASGVDAKAILSARLSKSRRLENLIAQLPGEKKNGLFGNLIALSLGLTPNFKSNFDLAEDAKLQLSKDTYDDDLDNLLAQIGDQYADLFLAAKNLSDAILLSDILRVNTEITKAPLSASMIKRYDEHHQDLTLLKALVRQQLPEKYKEIFFDQSKNGYAGYIDGGASQEEFYKFIKPILEKMDGTEELLVKLNREDLLRKQRTFDNGSIPHQIHLGELHAILRRQEDFYPFLKDNREKIEKILTFRIPYYVGPLARGNSRFAWMTRKSEETITPWNFEEVVDKGASAQSFIERMTNFDKNLPNEKVLPKHSLLYEYFTVYNELTKVKYVTEGMRKPAFLSGEQKKAIVDLLFKTNRKVTVKQLKEDYFKKIECFDSVEISGVEDRFNASLGTYHDLLKIIKDKDFLDNEENEDILEDIVLTLTLFEDREMIEERLKTYAHLFDDKVMKQLKRRRYTGWGRLSRKLINGIRDKQSGKTILDFLKSDGFANRNFMQLIHDDSLTFKEDIQKAQVSGQGDSLHEHIANLAGSPAIKKGILQTVKVVDELVKVMGRHKPENIVIEMARENQTTQKGQKNSRERMKRIEEGIKELGSEVEFSHEYWMRHALTLAKRARDEREVPVGAVLVLNNRVIGEGWNRAIGLHDPTAHAEIMALRQGGLVMQNYRLIDATLYVTFEPCVMCAGAMIHSRIGRVVFGVRNAKTGAAGSLMDVLHYPGMNHRVEITEGILADECAALLCYFFRMPRQVFNAQKKAQSSTDEEVVKKMKNYWRQLLNAKLITQRKFDNLTKAERGGLSELDKAGFIKRQLVETRQITKHVAQILDSRMNTKYDENDKLIREVKVITLKSKLVSDFRKDFQFYKVREINNYHHAHDAYLNAVVGTALIKKYPKLESEFVYGDYKVYDVRKMIAKSEQEIGKATAKYFFYSNIMNFFKTEITLANGEIRKRPLIETNGETGEIVWDKGRDFATVRKVLSMPQVNIVKKTEVQTGGFSKESILPKRNSDKLIARKKDWDPKKYGGFDSPTVAYSVLVVAKVEKGKSKKLKSVKELLGITIMERSSFEKNPIDFLEAKGYKEVKKDLIIKLPKYSLFELENGRKRMLASAGELQKGNELALPSKYVNFLYLASHYEKLKGSPEDNEQKQLFVEQHKHYLDEIIEQISEFSKRVILADANLDKVLSAYNKHRDKPIREQAENIIHLFTLTNLGAPAAFKYFDTTIDRKRYTSTKEVLDATLIHQSITGLYETRIDLSQLGGD

SEQ ID NO: 301 - protein, 1420 aa, synthetic construct
  REGION 1..1420: note = 125 Cas9 delta 792-906TadAins polypeptide sequence
MDKKYSIGLAIGTNSVGWAVITDEYKVPSKKFKVLGNTDRHSIKKNLIGALLFDSGETAEATRLKRTARRRYTRRKNRICYLQEIFSNEMAKVDDSFFHRLEESFLVEEDKKHERHPIFGNIVDEVAYHEKYPTIYHLRKKLVDSTDKADLRLIYLALAHMIKFRGHFLIEGDLNPDNSDVDKLFIQLVQTYNQLFEENPINASGVDAKAILSARLSKSRRLENLIAQLPGEKKNGLFGNLIALSLGLTPNFKSNFDLAEDAKLQLSKDTYDDDLDNLLAQIGDQYADLFLAAKNLSDAILLSDILRVNTEITKAPLSASMIKRYDEHHQDLTLLKALVRQQLPEKYKEIFFDQSKNGYAGYIDGGASQEEFYKFIKPILEKMDGTEELLVKLNREDLLRKQRTFDNGSIPHQIHLGELHAILRRQEDFYPFLKDNREKIEKILTFRIPYYVGPLARGNSRFAWMTRKSEETITPWNFEEVVDKGASAQSFIERMTNFDKNLPNEKVLPKHSLLYEYFTVYNELTKVKYVTEGMRKPAFLSGEQKKAIVDLLFKTNRKVTVKQLKEDYFKKIECFDSVEISGVEDRFNASLGTYHDLLKIIKDKDFLDNEENEDILEDIVLTLTLFEDREMIEERLKTYAHLFDDKVMKQLKRRRYTGWGRLSRKLINGIRDKQSGKTILDFLKSDGFANRNFMQLIHDDSLTFKEDIQKAQVSGQGDSLHEHIANLAGSPAIKKGILQTVKVVDELVKVMGRHKPENIVIEMARENQTTQKGQKNSRERMKRIEEGIKELGSEVEFSHEYWMRHALTLAKRARDEREVPVGAVLVLNNRVIGEGWNRAIGLHDPTAHAEIMALRQGGLVMQNYRLIDATLYVTFEPCVMCAGAMIHSRIGRVVFGVRNAKTGAAGSLMDVLHYPGMNHRVEITEGILADECAALLCYFFRMPRQVFNAQKKAQSSTDGLSELDKAGFIKRQLVETRQITKHVAQILDSRMNTKYDENDKLIREVKVITLKSKLVSDFRKDFQFYKVREINNYHHAHDAYLNAVVGTALIKKYPKLESEFVYGDYKVYDVRKMIAKSEQEIGKATAKYFFYSNIMNFFKTEITLANGEIRKRPLIETNGETGEIVWDKGRDFATVRKVLSMPQVNIVKKTEVQTGGFSKESILPKRNSDKLIARKKDWDPKKYGGFDSPTVAYSVLVVAKVEKGKSKKLKSVKELLGITIMERSSFEKNPIDFLEAKGYKEVKKDLIIKLPKYSLFELENGRKRMLASAGELQKGNELALPSKYVNFLYLASHYEKLKGSPEDNEQKQLFVEQHKHYLDEIIEQISEFSKRVILADANLDKVLSAYNKHRDKPIREQAENIIHLFTLTNLGAPAAFKYFDTTIDRKRYTSTKEVLDATLIHQSITGLYETRIDLSQLGGD

SEQ ID NO: 302 - protein, 1554 aa, synthetic construct
  REGION 1..1554: note = 126 TadA CP65ins 1003 polypeptide sequence
MDKKYSIGLAIGTNSVGWAVITDEYKVPSKKFKVLGNTDRHSIKKNLIGALLFDSGETAEATRLKRTARRRYTRRKNRICYLQEIFSNEMAKVDDSFFHRLEESFLVEEDKKHERHPIFGNIVDEVAYHEKYPTIYHLRKKLVDSTDKADLRLIYLALAHMIKFRGHFLIEGDLNPDNSDVDKLFIQLVQTYNQLFEENPINASGVDAKAILSARLSKSRRLENLIAQLPGEKKNGLFGNLIALSLGLTPNFKSNFDLAEDAKLQLSKDTYDDDLDNLLAQIGDQYADLFLAAKNLSDAILLSDILRVNTEITKAPLSASMIKRYDEHHQDLTLLKALVRQQLPEKYKEIFFDQSKNGYAGYIDGGASQEEFYKFIKPILEKMDGTEELLVKLNREDLLRKQRTFDNGSIPHQIHLGELHAILRRQEDFYPFLKDNREKIEKILTFRIPYYVGPLARGNSRFAWMTRKSEETITPWNFEEVVDKGASAQSFIERMTNFDKNLPNEKVLPKHSLLYEYFTVYNELTKVKYVTEGMRKPAFLSGEQKKAIVDLLFKTNRKVTVKQLKEDYFKKIECFDSVEISGVEDRFNASLGTYHDLLKIIKDKDFLDNEENEDILEDIVLTLTLFEDREMIEERLKTYAHLFDDKVMKQLKRRRYTGWGRLSRKLINGIRDKQSGKTILDFLKSDGFANRNFMQLIHDDSLTFKEDIQKAQVSGQGDSLHEHIANLAGSPAIKKGILQTVKVVDELVKVMGRHKPENIVIEMARENQTTQKGQKNSRERMKRIEEGIKELGSQILKEHPVENTQLQNEKLYLYYLQNGRDMYVDQELDINRLSDYDVDHIVPQSFLKDDSIDNKVLTRSDKNRGKSDNVPSEEVVKKMKNYWRQLLNAKLITQRKFDNLTKAERGGLSELDKAGFIKRQLVETRQITKHVAQILDSRMNTKYDENDKLIREVKVITLKSKLVSDFRKDFQFYKVREINNYHHAHDAYLNAVVGTALIKKYPKTAHAEIMALRQGGLVMQNYRLIDATLYVTFEPCVMCAGAMIHSRIGRVVFGVRNAKTGAAGSLMDVLHYPGMNHRVEITEGILADECAALLCYFFRMPRQVFNAQKKAQSSTDGSSGSETPGTSESATPESSGSEVEFSHEYWMRHALTLAKRARDEREVPVGAVLVLNNRVIGEGWNRAIGLHDPLESEFVYGDYKVYDVRKMIAKSEQEIGKATAKYFFYSNIMNFFKTEITLANGEIRKRPLIETNGETGEIVWDKGRDFATVRKVLSMPQVNIVKKTEVQTGGFSKESILPKRNSDKLIARKKDWDPKKYGGFDSPTVAYSVLVVAKVEKGKSKKLKSVKELLGITIMERSSFEKNPIDFLEAKGYKEVKKDLIIKLPKYSLFELENGRKRMLASAGELQKGNELALPSKYVNFLYLASHYEKLKGSPEDNEQKQLFVEQHKHYLDEIIEQISEFSKRVILADANLDKVLSAYNKHRDKPIREQAENIIHLFTLTNLGAPAAFKYFDTTIDRKRYTSTKEVLDATLIHQSITGLYETRIDLSQLGGD

SEQ ID NO: 303 - protein, 1554 aa, synthetic construct
  REGION 1..1554: note = 127 TadA CP65ins 1016 polypeptide sequence
MDKKYSIGLAIGTNSVGWAVITDEYKVPSKKFKVLGNTDRHSIKKNLIGALLFDSGETAEATRLKRTARRRYTRRKNRICYLQEIFSNEMAKVDDSFFHRLEESFLVEEDKKHERHPIFGNIVDEVAYHEKYPTIYHLRKKLVDSTDKADLRLIYLALAHMIKFRGHFLIEGDLNPDNSDVDKLFIQLVQTYNQLFEENPINASGVDAKAILSARLSKSRRLENLIAQLPGEKKNGLFGNLIALSLGLTPNFKSNFDLAEDAKLQLSKDTYDDDLDNLLAQIGDQYADLFLAAKNLSDAILLSDILRVNTEITKAPLSASMIKRYDEHHQDLTLLKALVRQQLPEKYKEIFFDQSKNGYAGYIDGGASQEEFYKFIKPILEKMDGTEELLVKLNREDLLRKQRTFDNGSIPHQIHLGELHAILRRQEDFYPFLKDNREKIEKILTFRIPYYVGPLARGNSRFAWMTRKSEETITPWNFEEVVDKGASAQSFIERMTNFDKNLPNEKVLPKHSLLYEYFTVYNELTKVKYVTEGMRKPAFLSGEQKKAIVDLLFKTNRKVTVKQLKEDYFKKIECFDSVEISGVEDRFNASLGTYHDLLKIIKDKDFLDNEENEDILEDIVLTLTLFEDREMIEERLKTYAHLFDDKVMKQLKRRRYTGWGRLSRKLINGIRDKQSGKTILDFLKSDGFANRNFMQLIHDDSLTFKEDIQKAQVSGQGDSLHEHIANLAGSPAIKKGILQTVKVVDELVKVMGRHKPENIVIEMARENQTTQKGQKNSRERMKRIEEGIKELGSQILKEHPVENTQLQNEKLYLYYLQNGRDMYVDQELDINRLSDYDVDHIVPQSFLKDDSIDNKVLTRSDKNRGKSDNVPSEEVVKKMKNYWRQLLNAKLITQRKFDNLTKAERGGLSELDKAGFIKRQLVETRQITKHVAQILDSRMNTKYDENDKLIREVKVITLKSKLVSDFRKDFQFYKVREINNYHHAHDAYLNAVVGTALIKKYPKLESEFVYGDYKVTAHAEIMALRQGGLVMQNYRLIDATLYVTFEPCVMCAGAMIHSRIGRVVFGVRNAKTGAAGSLMDVLHYPGMNHRVEITEGILADECAALLCYFFRMPRQVFNAQKKAQSSTDGSSGSETPGTSESATPESSGSEVEFSHEYWMRHALTLAKRARDEREVPVGAVLVLNNRVIGEGWNRAIGLHDPYDVRKMIAKSEQEIGKATAKYFFYSNIMNFFKTEITLANGEIRKRPLIETNGETGEIVWDKGRDFATVRKVLSMPQVNIVKKTEVQTGGFSKESILPKRNSDKLIARKKDWDPKKYGGFDSPTVAYSVLVVAKVEKGKSKKLKSVKELLGITIMERSSFEKNPIDFLEAKGYKEVKKDLIIKLPKYSLFELENGRKRMLASAGELQKGNELALPSKYVNFLYLASHYEKLKGSPEDNEQKQLFVEQHKHYLDEIIEQISEFSKRVILADANLDKVLSAYNKHRDKPIREQAENIIHLFTLTNLGAPAAFKYFDTTIDRKRYTSTKEVLDATLIHQSITGLYETRIDLSQLGGD

SEQ ID NO: 304 - protein, 1554 aa, synthetic construct
  REGION 1..1554: note = 128 TadA CP65ins 1022 polypeptide sequence
MDKKYSIGLAIGTNSVGWAVITDEYKVPSKKFKVLGNTDRHSIKKNLIGALLFDSGETAEATRLKRTARRRYTRRKNRICYLQEIFSNEMAKVDDSFFHRLEESFLVEEDKKHERHPIFGNIVDEVAYHEKYPTIYHLRKKLVDSTDKADLRLIYLALAHMIKFRGHFLIEGDLNPDNSDVDKLFIQLVQTYNQLFEENPINASGVDAKAILSARLSKSRRLENLIAQLPGEKKNGLFGNLIALSLGLTPNFKSNFDLAEDAKLQLSKDTYDDDLDNLLAQIGDQYADLFLAAKNLSDAILLSDILRVNTEITKAPLSASMIKRYDEHHQDLTLLKALVRQQLPEKYKEIFFDQSKNGYAGYIDGGASQEEFYKFIKPILEKMDGTEELLVKLNREDLLRKQRTFDNGSIPHQIHLGELHAILRRQEDFYPFLKDNREKIEKILTFRIPYYVGPLARGNSRFAWMTRKSEETITPWNFEEVVDKGASAQSFIERMTNFDKNLPNEKVLPKHSLLYEYFTVYNELTKVKYVTEGMRKPAFLSGEQKKAIVDLLFKTNRKVTVKQLKEDYFKKIECFDSVEISGVEDRFNASLGTYHDLLKIIKDKDFLDNEENEDILEDIVLTLTLFEDREMIEERLKTYAHLFDDKVMKQLKRRRYTGWGRLSRKLINGIRDKQSGKTILDFLKSDGFANRNFMQLIHDDSLTFKEDIQKAQVSGQGDSLHEHIANLAGSPAIKKGILQTVKVVDELVKVMGRHKPENIVIEMARENQTTQKGQKNSRERMKRIEEGIKELGSQILKEHPVENTQLQNEKLYLYYLQNGRDMYVDQELDINRLSDYDVDHIVPQSFLKDDSIDNKVLTRSDKNRGKSDNVPSEEVVKKMKNYWRQLLNAKLITQRKFDNLTKAERGGLSELDKAGFIKRQLVETRQITKHVAQILDSRMNTKYDENDKLIREVKVITLKSKLVSDFRKDFQFYKVREINNYHHAHDAYLNAVVGTALIKKYPKLESEFVYGDYKVYDVRKMITAHAEIMALRQGGLVMQNYRLIDATLYVTFEPCVMCAGAMIHSRIGRVVFGVRNAKTGAAGSLMDVLHYPGMNHRVEITEGILADECAALLCYFFRMPRQVFNAQKKAQSSTDGSSGSETPGTSESATPESSGSEVEFSHEYWMRHALTLAKRARDEREVPVGAVLVLNNRVIGEGWNRAIGLHDPAKSEQEIGKATAKYFFYSNIMNFFKTEITLANGEIRKRPLIETNGETGEIVWDKGRDFATVRKVLSMPQVNIVKKTEVQTGGFSKESILPKRNSDKLIARKKDWDPKKYGGFDSPTVAYSVLVVAKVEKGKSKKLKSVKELLGITIMERSSFEKNPIDFLEAKGYKEVKKDLIIKLPKYSLFELENGRKRMLASAGELQKGNELALPSKYVNFLYLASHYEKLKGSPEDNEQKQLFVEQHKHYLDEIIEQISEFSKRVILADANLDKVLSAYNKHRDKPIREQAENIIHLFTLTNLGAPAAFKYFDTTIDRKRYTSTKEVLDATLIHQSITGLYETRIDLSQLGGD

SEQ ID NO: 305 - protein, 1554 aa, synthetic construct
  REGION 1..1554: note = 129 TadA CP65ins 1029 polypeptide sequence
MDKKYSIGLAIGTNSVGWAVITDEYKVPSKKFKVLGNTDRHSIKKNLIGALLFDSGETAEATRLKRTARRRYTRRKNRICYLQEIFSNEMAKVDDSFFHRLEESFLVEEDKKHERHPIFGNIVDEVAYHEKYPTIYHLRKKLVDSTDKADLRLIYLALAHMIKFRGHFLIEGDLNPDNSDVDKLFIQLVQTYNQLFEENPINASGVDAKAILSARLSKSRRLENLIAQLPGEKKNGLFGNLIALSLGLTPNFKSNFDLAEDAKLQLSKDTYDDDLDNLLAQIGDQYADLFLAAKNLSDAILLSDILRVNTEITKAPLSASMIKRYDEHHQDLTLLKALVRQQLPEKYKEIFFDQSKNGYAGYIDGGASQEEFYKFIKPILEKMDGTEELLVKLNREDLLRKQRTFDNGSIPHQIHLGELHAILRRQEDFYPFLKDNREKIEKILTFRIPYYVGPLARGNSRFAWMTRKSEETITPWNFEEVVDKGASAQSFIERMTNFDKNLPNEKVLPKHSLLYEYFTVYNELTKVKYVTEGMRKPAFLSGEQKKAIVDLLFKTNRKVTVKQLKEDYFKKIECFDSVEISGVEDRFNASLGTYHDLLKIIKDKDFLDNEENEDILEDIVLTLTLFEDREMIEERLKTYAHLFDDKVMKQLKRRRYTGWGRLSRKLINGIRDKQSGKTILDFLKSDGFANRNFMQLIHDDSLTFKEDIQKAQVSGQGDSLHEHIANLAGSPAIKKGILQTVKVVDELVKVMGRHKPENIVIEMARENQTTQKGQKNSRERMKRIEEGIKELGSQILKEHPVENTQLQNEKLYLYYLQNGRDMYVDQELDINRLSDYDVDHIVPQSFLKDDSIDNKVLTRSDKNRGKSDNVPSEEVVKKMKNYWRQLLNAKLITQRKFDNLTKAERGGLSELDKAGFIKRQLVETRQITKHVAQILDSRMNTKYDENDKLIREVKVITLKSKLVSDFRKDFQFYKVREINNYHHAHDAYLNAVVGTALIKKYPKLESEFVYGDYKVYDVRKMIAKSEQEITAHAEIMALRQGGLVMQNYRLIDATLYVTFEPCVMCAGAMIHSRIGRVVFGVRNAKTGAAGSLMDVLHYPGMNHRVEITEGILADECAALLCYFFRMPRQVFNAQKKAQSSTDGSSGSETPGTSESATPESSGSEVEFSHEYWMRHALTLAKRARDEREVPVGAVLVLNNRVIGEGWNRAIGLHDPGKATAKYFFYSNIMNFFKTEITLANGEIRKRPLIETNGETGEIVWDKGRDFATVRKVLSMPQVNIVKKTEVQTGGFSKESILPKRNSDKLIARKKDWDPKKYGGFDSPTVAYSVLVVAKVEKGKSKKLKSVKELLGITIMERSSFEKNPIDFLEAKGYKEVKKDLIIKLPKYSLFELENGRKRMLASAGELQKGNELALPSKYVNFLYLASHYEKLKGSPEDNEQKQLFVEQHKHYLDEIIEQISEFSKRVILADANLDKVLSAYNKHRDKPIREQAENIIHLFTLTNLGAPAAFKYFDTTIDRKRYTSTKEVLDATLIHQSITGLYETRIDLSQLGGD

SEQ ID NO: 306 - protein, 1554 aa, synthetic construct
  REGION 1..1554: note = 130 TadA CP65ins 1041 polypeptide sequence
MDKKYSIGLAIGTNSVGWAVITDEYKVPSKKFKVLGNTDRHSIKKNLIGALLFDSGETAEATRLKRTARRRYTRRKNRICYLQEIFSNEMAKVDDSFFHRLEESFLVEEDKKHERHPIFGNIVDEVAYHEKYPTIYHLRKKLVDSTDKADLRLIYLALAHMIKFRGHFLIEGDLNPDNSDVDKLFIQLVQTYNQLFEENPINASGVDAKAILSARLSKSRRLENLIAQLPGEKKNGLFGNLIALSLGLTPNFKSNFDLAEDAKLQLSKDTYDDDLDNLLAQIGDQYADLFLAAKNLSDAILLSDILRVNTEITKAPLSASMIKRYDEHHQDLTLLKALVRQQLPEKYKEIFFDQSKNGYAGYIDGGASQEEFYKFIKPILEKMDGTEELLVKLNREDLLRKQRTFDNGSIPHQIHLGELHAILRRQEDFYPFLKDNREKIEKILTFRIPYYVGPLARGNSRFAWMTRKSEETITPWNFEEVVDKGASAQSFIERMTNFDKNLPNEKVLPKHSLLYEYFTVYNELTKVKYVTEGMRKPAFLSGEQKKAIVDLLFKTNRKVTVKQLKEDYFKKIECFDSVEISGVEDRFNASLGTYHDLLKIIKDKDFLDNEENEDILEDIVLTLTLFEDREMIEERLKTYAHLFDDKVMKQLKRRRYTGWGRLSRKLINGIRDKQSGKTILDFLKSDGFANRNFMQLIHDDSLTFKEDIQKAQVSGQGDSLHEHIANLAGSPAIKKGILQTVKVVDELVKVMGRHKPENIVIEMARENQTTQKGQKNSRERMKRIEEGIKELGSQILKEHPVENTQLQNEKLYLYYLQNGRDMYVDQELDINRLSDYDVDHIVPQSFLKDDSIDNKVLTRSDKNRGKSDNVPSEEVVKKMKNYWRQLLNAKLITQRKFDNLTKAERGGLSELDKAGFIKRQLVETRQITKHVAQILDSRMNTKYDENDKLIREVKVITLKSKLVSDFRKDFQFYKVREINNYHHAHDAYLNAVVGTALIKKYPKLESEFVYGDYKVYDVRKMIAKSEQEIGKATAKYFFYSTAHAEIMALRQGGLVMQNYRLIDATLYVTFEPCVMCAGAMIHSRIGRVVFGVRNAKTGAAGSLMDVLHYPGMNHRVEITEGILADECAALLCYFFRMPRQVFNAQKKAQSSTDGSSGSETPGTSESATPESSGSEVEFSHEYWMRHALTLAKRARDEREVPVGAVLVLNNRVIGEGWNRAIGLHDPNIMNFFKTEITLANGEIRKRPLIETNGETGEIVWDKGRDFATVRKVLSMPQVNIVKKTEVQTGGFSKESILPKRNSDKLIARKKDWDPKKYGGFDSPTVAYSVLVVAKVEKGKSKKLKSVKELLGITIMERSSFEKNPIDFLEAKGYKEVKKDLIIKLPKYSLFELENGRKRMLASAGELQKGNELALPSKYVNFLYLASHYEKLKGSPEDNEQKQLFVEQHKHYLDEIIEQISEFSKRVILADANLDKVLSAYNKHRDKPIREQAENIIHLFTLTNLGAPAAFKYFDTTIDRKRYTSTKEVLDATLIHQSITGLYETRIDLSQLGGD

SEQ ID NO: 307 - protein, 1554 aa, synthetic construct
  REGION 1..1554: note = 131 TadA CP65ins 1054 polypeptide sequence
MDKKYSIGLAIGTNSVGWAVITDEYKVPSKKFKVLGNTDRHSIKKNLIGALLFDSGETAEATRLKRTARRRYTRRKNRICYLQEIFSNEMAKVDDSFFHRLEESFLVEEDKKHERHPIFGNIVDEVAYHEKYPTIYHLRKKLVDSTDKADLRLIYLALAHMIKFRGHFLIEGDLNPDNSDVDKLFIQLVQTYNQLFEENPINASGVDAKAILSARLSKSRRLENLIAQLPGEKKNGLFGNLIALSLGLTPNFKSNFDLAEDAKLQLSKDTYDDDLDNLLAQIGDQYADLFLAAKNLSDAILLSDILRVNTEITKAPLSASMIKRYDEHHQDLTLLKALVRQQLPEKYKEIFFDQSKNGYAGYIDGGASQEEFYKFIKPILEKMDGTEELLVKLNREDLLRKQRTFDNGSIPHQIHLGELHAILRRQEDFYPFLKDNREKIEKILTFRIPYYVGPLARGNSRFAWMTRKSEETITPWNFEEVVDKGASAQSFIERMTNFDKNLPNEKVLPKHSLLYEYFTVYNELTKVKYVTEGMRKPAFLSGEQKKAIVDLLFKTNRKVTVKQLKEDYFKKIECFDSVEISGVEDRFNASLGTYHDLLKIIKDKDFLDNEENEDILEDIVLTLTLFEDREMIEERLKTYAHLFDDKVMKQLKRRRYTGWGRLSRKLINGIRDKQSGKTILDFLKSDGFANRNFMQLIHDDSLTFKEDIQKAQVSGQGDSLHEHIANLAGSPAIKKGILQTVKVVDELVKVMGRHKPENIVIEMARENQTTQKGQKNSRERMKRIEEGIKELGSQILKEHPVENTQLQNEKLYLYYLQNGRDMYVDQELDINRLSDYDVDHIVPQSFLKDDSIDNKVLTRSDKNRGKSDNVPSEEVVKKMKNYWRQLLNAKLITQRKFDNLTKAERGGLSELDKAGFIKRQLVETRQITKHVAQILDSRMNTKYDENDKLIREVKVITLKSKLVSDFRKDFQFYKVREINNYHHAHDAYLNAVVGTALIKKYPKLESEFVYGDYKVYDVRKMIAKSEQEIGKATAKYFFYSNIMNFFKTEITLANTAHAEIMALRQGGLVMQNYRLIDATLYVTFEPCVMCAGAMIHSRIGRVVFGVRNAKTGAAGSLMDVLHYPGMNHRVEITEGILADECAALLCYFFRMPRQVFNAQKKAQSSTDGSSGSETPGTSESATPESSGSEVEFSHEYWMRHALTLAKRARDEREVPVGAVLVLNNRVIGEGWNRAIGLHDPGEIRKRPLIETNGETGEIVWDKGRDFATVRKVLSMPQVNIVKKTEVQTGGFSKESILPKRNSDKLIARKKDWDPKKYGGFDSPTVAYSVLVVAKVEKGKSKKLKSVKELLGITIMERSSFEKNPIDFLEAKGYKEVKKDLIIKLPKYSLFELENGRKRMLASAGELQKGNELALPSKYVNFLYLASHYEKLKGSPEDNEQKQLFVEQHKHYLDEIIEQISEFSKRVILADANLDKVLSAYNKHRDKPIREQAENIIHLFTLTNLGAPAAFKYFDTTIDRKRYTSTKEVLDATLIHQSITGLYETRIDLSQLGGD

SEQ ID NO: 308 - protein, 1554 aa, synthetic construct
  REGION 1..1554: note = 132 TadA CP65ins 1246 polypeptide sequence
MDKKYSIGLAIGTNSVGWAVITDEYKVPSKKFKVLGNTDRHSIKKNLIGALLFDSGETAEATRLKRTARRRYTRRKNRICYLQEIFSNEMAKVDDSFFHRLEESFLVEEDKKHERHPIFGNIVDEVAYHEKYPTIYHLRKKLVDSTDKADLRLIYLALAHMIKFRGHFLIEGDLNPDNSDVDKLFIQLVQTYNQLFEENPINASGVDAKAILSARLSKSRRLENLIAQLPGEKKNGLFGNLIALSLGLTPNFKSNFDLAEDAKLQLSKDTYDDDLDNLLAQIGDQYADLFLAAKNLSDAILLSDILRVNTEITKAPLSASMIKRYDEHHQDLTLLKALVRQQLPEKYKEIFFDQSKNGYAGYIDGGASQEEFYKFIKPILEKMDGTEELLVKLNREDLLRKQRTFDNGSIPHQIHLGELHAILRRQEDFYPFLKDNREKIEKILTFRIPYYVGPLARGNSRFAWMTRKSEETITPWNFEEVVDKGASAQSFIERMTNFDKNLPNEKVLPKHSLLYEYFTVYNELTKVKYVTEGMRKPAFLSGEQKKAIVDLLFKTNRKVTVKQLKEDYFKKIECFDSVEISGVEDRFNASLGTYHDLLKIIKDKDFLDNEENEDILEDIVLTLTLFEDREMIEERLKTYAHLFDDKVMKQLKRRRYTGWGRLSRKLINGIRDKQSGKTILDFLKSDGFANRNFMQLIHDDSLTFKEDIQKAQVSGQGDSLHEHIANLAGSPAIKKGILQTVKVVDELVKVMGRHKPENIVIEMARENQTTQKGQKNSRERMKRIEEGIKELGSQILKEHPVENTQLQNEKLYLYYLQNGRDMYVDQELDINRLSDYDVDHIVPQSFLKDDSIDNKVLTRSDKNRGKSDNVPSEEVVKKMKNYWRQLLNAKLITQRKFDNLTKAERGGLSELDKAGFIKRQLVETRQITKHVAQILDSRMNTKYDENDKLIREVKVITLKSKLVSDFRKDFQFYKVREINNYHHAHDAYLNAVVGTALIKKYPKLESEFVYGDYKVYDVRKMIAKSEQEIGKATAKYFFYSNIMNFFKTEITLANGEIRKRPLIETNGETGEIVWDKGRDFATVRKVLSMPQVNIVKKTEVQTGGFSKESILPKRNSDKLIARKKDWDPKKYGGFDSPTVAYSVLVVAKVEKGKSKKLKSVKELLGITIMERSSFEKNPIDFLEAKGYKEVKKDLIIKLPKYSLFELENGRKRMLASAGELQKGNELALPSKYVNFLYLASHYEKLKGTAHAEIMALRQGGLVMQNYRLIDATLYVTFEPCVMCAGAMIHSRIGRVVFGVRNAKTGAAGSLMDVLHYPGMNHRVEITEGILADECAALLCYFFRMPRQVFNAQKKAQSSTDGSSGSETPGTSESATPESSGSEVEFSHEYWMRHALTLAKRARDEREVPVGAVLVLNNRVIGEGWNRAIGLHDPSPEDNEQKQLFVEQHKHYLDEIIEQISEFSKRVILADANLDKVLSAYNKHRDKPIREQAENIIHLFTLTNLGAPAAFKYFDTTIDRKRYTSTKEVLDATLIHQSITGLYETRIDLSQLGGD

SEQ ID NO: 309 - protein, 160 aa, Staphylococcus aureus
  REGION 1..160: note = MISC_FEATURE - TadA polypeptide sequence
MGSHMTNDIYFMTLAIEEAKKAAQLGEVPIGAIITKDDEVIARAHNLRETLQQPTAHAEHIAIERAAKVLGSWRLEGCTLYVTLEPCVMCAGTIVMSRIPRVVYGADDPKGGCSGSLMNLLQQSNFNHRAIVDKGVLKEACSTLLTTFFKNLRANKKSTN

SEQ ID NO: 310 - protein, 161 aa, Bacillus subtilis
  REGION 1..161: note = MISC_FEATURE - TadA polypeptide sequence
MTQDELYMKEAIKEAKKAEEKGEVPIGAVLVINGEIIARAHNLRETEQRSIAHAEMLVIDEACKALGTWRLEGATLYVTLEPCPMCAGAVVLSRVEKVVFGAFDPKGGCSGTLMNLLQEERFNHQAEVVSGVLEEECGGMLSAFFRELRKKKKAARKNLSE

SEQ ID NO: 311 - protein, 183 aa, Salmonella enterica
  REGION 1..183: note = MISC_FEATURE - TadA polypeptide sequence
  source 1..183: note = serovar Typhimurium
MPPAFITGVTSLSDVELDHEYWMRHALTLAKRAWDEREVPVGAVLVHNHRVIGEGWNRPIGRHDPTAHAEIMALRQGGLVLQNYRLLDTTLYVTLEPCVMCAGAMVHSRIGRVVFGARDAKTGAAGSLIDVLHHPGMNHRVEIIEGVLRDECATLLSDFFRMRRQEIKALKKADRAEGAGPAV

SEQ ID NO: 312 - protein, 164 aa, Shewanella putrefaciens
  REGION 1..164: note = MISC_FEATURE - TadA polypeptide sequence
MDEYWMQVAMQMAEKAEAAGEVPVGAVLVKDGQQIATGYNLSISQHDPTAHAEILCLRSAGKKLENYRLLDATLYITLEPCAMCAGAMVHSRIARVVYGARDEKTGAAGTVVNLLQHPAFNHQVEVTSGVLAEACSAQLSRFFKRRRDEKKALKLAQRAQQGIE

SEQ ID NO: 313 - protein, 173 aa, Haemophilus influenzae
  REGION 1..173: note = MISC_FEATURE - TadA polypeptide sequence
MDAAKVRSEFDEKMMRYALELADKAEALGEIPVGAVLVDDARNIIGEGWNLSIVQSDPTAHAEIIALRNGAKNIQNYRLLNSTLYVTLEPCTMCAGAILHSRIKRLVFGASDYKTGAIGSRFHFFDDYKMNHTLEITSGVLAEECSQKLSTFFQKRREEKKIEKALLKSLSDK

SEQ ID NO: 314 - protein, 161 aa, Caulobacter crescentus
  REGION 1..161: note = MISC_FEATURE - TadA polypeptide sequence
MRTDESEDQDHRMMRLALDAARAAAEAGETPVGAVILDPSTGEVIATAGNGPIAAHDPTAHAEIAAMRAAAAKLGNYRLTDLTLVVTLEPCAMCAGAISHARIGRVVFGADDPKGGAVVHGPKFFAQPTCHWRPEVTGGVLADESADLLRGFFRARRKAKI

SEQ ID NO: 315 - protein, 179 aa, Geobacter sulfurreducens
  REGION 1..179: note = MISC_FEATURE - TadA polypeptide sequence
MSSLKKTPIRDDAYWMGKAIREAAKAAARDEVPIGAVIVRDGAVIGRGHNLREGSNDPSAHAEMIAIRQAARRSANWRLTGATLYVTLEPCLMCMGAIILARLERVVFGCYDPKGGAAGSLYDLSADPRLNHQVRLSPGVCQEECGTMLSDFFRDLRRRKKAKATPALFIDERKVPPEP

SEQ ID NO: 316 - protein, 167 aa, synthetic construct
  REGION 1..167: note = TadA*8 polypeptide sequence
MSEVEFSHEYWMRHALTLAKRARDEREVPVGAVLVLNNRVIGEGWNRAIGLHDPTAHAEIMALRQGGLVMQNYRLIDATLYVTFEPCVMCAGAMIHSRIGRVVFGVRNAKTGAAGSLMDVLHYPGMNHRVEITEGILADECAALLCTFFRMPRQVFNAQKKAQSSTD

SEQ ID NO: 317 - RNA, 80 nt, synthetic construct
  misc_feature 1..80: note = gRNA scaffold polynucleotide sequence
  source 1..80: mol_type = other RNA
gttttagagctagaaatagcaagttaaaataaggctagtccgttatcaacttgaaaaagtggcaccgagtcggtgctttt

SEQ ID NO: 318 - RNA, 125 nt, synthetic construct
  misc_feature 1..125: note = gRNA scaffold polynucleotide sequence
  source 1..125: mol_type = other RNA
gtttttgtactctcaagatttaagtaactgtacaacgaaacttacacagttacttaaatcttgcagaagctacaaagataaggcttcatgccgaaatcaacaccctgtcattttatggcagggtg

SEQ ID NO: 319 - RNA, 76 nt, Streptococcus pyogenes
  misc_feature 1..76: note = S. pyogenes gRNA scaffold oligonucleotide sequence
  source 1..76: mol_type = other RNA
gttttagagctagaaatagcaagttaaaataaggctagtccgttatcaacttgaaaaagtggcaccgagtcggtgc

SEQ ID NO: 320 - RNA, 84 nt, Staphylococcus aureus
  misc_feature 1..84: note = S. aureus gRNA scaffold oligonucleotide sequence
  source 1..84: mol_type = other RNA
gttttagtactctgtaatgaaaattacagaatctactaaaacaaggcaaaatgccgtgtttatctcgtcaacttgttggcgaga

SEQ ID NO: 321 - RNA, 97 nt, Bacillus hisashii
  misc_feature 1..97: note = BhCas12b gRNA scaffold oligonucleotide sequence
  source 1..97: mol_type = other RNA
gttctgtcttttggtcaggacaaccgtctagctataagtgctgcagggtgtgagaaactcctattgctggacgatgtctcttacgaggcattagcac

SEQ ID NO: 322 - RNA, 88 nt, Bacillus sp.
  misc_feature 1..88: note = BvCas12b gRNA scaffold oligonucleotide sequence
  source 1..88: mol_type = other RNA
gacctatagggtcaatgaatctgtgcgtgtgccataagtaattaaaaattacccaccacaggagcacctgaaaacaggtgcttggcac

SEQ ID NO: 323 - RNA, 80 nt, synthetic construct
  misc_feature 1..80: note = gRNA scaffold nucleotide sequence; oligonucleotide sequence
  modified_base 78..80: mod_base = um
  misc_feature 78..80: note = In embodiments, a nucleotide(s) is linked to the preceding 5' nucleotide by a 3' phosphorothioate internucleotide linkage
  source 1..80: mol_type = other RNA
gttttagagctagaaatagcaagttaaaataaggctagtccgttatcaacttgaaaaagtgggaccgagtcggtgctttt

SEQ ID NO: 324 - RNA, 80 nt, synthetic construct; identical to SEQ ID NO: 317
  misc_feature 1..80: note = gRNA scaffold nucleotide sequence
  misc_feature 78..80: note = In embodiments, a nucleotide(s) is linked to the preceding 5' nucleotide by a 3' phosphorothioate internucleotide linkage
  modified_base 78..80: mod_base = um
  source 1..80: mol_type = other RNA

SEQ ID NO: 325 - RNA, 117 nt, Bacillus hisashii
  misc_feature 1..117: note = BhCas12b gRNA scaffold + guide sequence; oligonucleotide sequence
  misc_feature 1..97: note = BhCas12b sgRNA scaffold
  source 1..117: mol_type = other RNA
gttctgtcttttggtcaggacaaccgtctagctataagtgctgcagggtgtgagaaactcctattgctggacgatgtctcttacgaggcattagcacnnnnnnnnnnnnnnnnnnnn

SEQ ID NO: 326 - RNA, 108 nt, Bacillus sp.
  misc_feature 1..108: note = BvCas12b gRNA scaffold + guide sequence; oligonucleotide sequence
  misc_feature 1..88: note = BvCas12b gRNA scaffold
  source 1..108: mol_type = other RNA
gacctatagggtcaatgaatctgtgcgtgtgccataagtaattaaaaattacccaccacaggagcacctgaaaacaggtgcttggcacnnnnnnnnnnnnnnnnnnnn

SEQ ID NO: 327 - RNA, 119 nt, Alicyclobacillus acidiphilus
  misc_feature 1..119: note = AaCas12b gRNA scaffold + guide sequence; oligonucleotide sequence
  misc_feature 1..99: note = AaCas12b gRNA scaffold
  source 1..119: mol_type = other RNA
gtctaaaggacagaatttttcaacgggtgtgccaatggccactttccaggtggcaaagcccgttgaacttctcaaaaagaacgatctgagaagtggcacnnnnnnnnnnnnnnnnnnnn

SEQ ID NO: 328 - protein, 29 aa, synthetic construct
  REGION 1..29: note = synthetic polypeptide sequence
PKKKRKVEGADKRTADGSEFESPKKKRKV

SEQ ID NO: 329 - protein, 23 aa, synthetic construct
  REGION 1..23: note = synthetic peptide sequence
RKSGKIAAIVVKRPRKPKKKRKV

SEQ ID NO: 330 - protein, 8 aa, synthetic construct
  REGION 1..8: note = synthetic peptide sequence
SGGSSGGS

SEQ ID NO: 331 - protein, 1609 aa, synthetic construct
  REGION 1..1609: note = pNMG-B335ABE8.1_Y147T_CP5_NGC PAM_monomer polypeptide sequence
MSEVEFSHEYWMRHALTLAKRARDEREVPVGAVLVLNNRVIGEGWNRAIGLHDPTAHAEIMALRQGGLVMQNYRLIDATLYVTFEPCVMCAGAMIHSRIGRVVFGVRNAKTGAAGSLMDVLHYPGMNHRVEITEGILADECAALLCTFFRMPRQVFNAQKKAQSSTDSGGSSGGSSGSETPGTSESATPESSGGSSGGSEIGKATAKYFFYSNIMNFFKTEITLANGEIRKRPLIETNGETGEIVWDKGRDFATVRKVLSMPQVNIVKKTEVQTGGFSKESILPKRNSDKLIARKKDWDPKKYGGFMQPTVAYSVLVVAKVEKGKSKKLKSVKELLGITIMERSSFEKNPIDFLEAKGYKEVKKDLIIKLPKYSLFELENGRKRMLASAKFLQKGNELALPSKYVNFLYLASHYEKLKGSPEDNEQKQLFVEQHKHYLDEIIEQISEFSKRVILADANLDKVLSAYNKHRDKPIREQAENIIHLFTLTNLGAPRAFKYFDTTIARKEYRSTKEVLDATLIHQSITGLYETRIDLSQLGGDGGSGGSGGSGGSGGSGGSGGMDKKYSIGLAIGTNSVGWAVITDEYKVPSKKFKVLGNTDRHSIKKNLIGALLFDSGETAEATRLKRTARRRYTRRKNRICYLQEIFSNEMAKVDDSFFHRLEESFLVEEDKKHERHPIFGNIVDEVAYHEKYPTIYHLRKKLVDSTDKADLRLIYLALAHMIKFRGHFLIEGDLNPDNSDVDKLFIQLVQTYNQLFEENPINASGVDAKAILSARLSKSRRLENLIAQLPGEKKNGLFGNLIALSLGLTPNFKSNFDLAEDAKLQLSKDTYDDDLDNLLAQIGDQYADLFLAAKNLSDAILLSDILRVNTEITKAPLSASMIKRYDEHHQDLTLLKALVRQQLPEKYKEIFFDQSKNGYAGYIDGGASQEEFYKFIKPILEKMDGTEELLVKLNREDLLRKQRTFDNGSIPHQIHLGELHAILRRQEDFYPFLKDNREKIEKILTFRIPYYVGPLARGNSRFAWMTRKSEETITPWNFEEVVDKGASAQSFIERMTNFDKNLPNEKVLPKHSLLYEYFTVYNELTKVKYVTEGMRKPAFLSGEQKKAIVDLLFKTNRKVTVKQLKEDYFKKIECFDSVEISGVEDRFNASLGTYHDLLKIIKDKDFLDNEENEDILEDIVLTLTLFEDREMIEERLKTYAHLFDDKVMKQLKRRRYTGWGRLSRKLINGIRDKQSGKTILDFLKSDGFANRNFMQLIHDDSLTFKEDIQKAQVSGQGDSLHEHIANLAGSPAIKKGILQTVKVVDELVKVMGRHKPENIVIEMARENQTTQKGQKNSRERMKRIEEGIKELGSQILKEHPVENTQLQNEKLYLYYLQNGRDMYVDQELDINRLSDYDVDHIVPQSFLKDDSIDNKVLTRSDKNRGKSDNVPSEEVVKKMKNYWRQLLNAKLITQRKFDNLTKAERGGLSELDKAGFIKRQLVETRQITKHVAQILDSRMNTKYDENDKLIREVKVITLKSKLVSDFRKDFQFYKVREINNYHHAHDAYLNAVVGTALIKKYPKLESEFVYGDYKVYDVRKMIAKSEQEGADKRTADGSEFESPKKKRKV

SEQ ID NO: 332 - protein, 1807 aa, synthetic construct
  REGION 1..1807: note = pNMG-357_ABE8.14 with NGC PAMCP5 polypeptide sequence
  REGION 1..174: note = MISC_FEATURE - Adenosine deaminase sequence
  REGION 175..198: note = MISC_FEATURE - Linker sequence
  REGION 199..365: note = MISC_FEATURE - Adenosine deaminase sequence
  REGION 366..397: note = MISC_FEATURE - Linker sequence
  REGION 398..738: note = MISC_FEATURE - Sequence derived from Cas9
  REGION 739..759: note = MISC_FEATURE - Linker sequence
  REGION 760..1785: note = MISC_FEATURE - Sequence derived from Cas9
  REGION 1786..1807: note = MISC_FEATURE - Bipartite nuclear localization sequence
MSEVEFSHEYWMRHALTLAKRAWDEREVPVGAVLVHNNRVIGEGWNRPIGRHDPTAHAEIMALRQGGLVMQNYRLIDATLYVTLEPCVMCAGAMIHSRIGRVVFGARDAKTGAAGSLMDVLHHPGMNHRVEITEGILADECAALLSDFFRMRRQEIKAQKKAQSSTDGGSSGGSSGSETPGTSESATPESSGGSSGGSMSEVEFSHEYWMRHALTLAKRARDEREVPVGAVLVLNNRVIGEGWNRAIGLHDPTAHAEIMALRQGGLVMQNYRLIDATLYVTFEPCVMCAGAMIHSRIGRVVFGVRNAKTGAAGSLMDVLHYPGMNHRVEITEGILADECAALLCTFFRMPRQVFNAQKKAQSSTDSGGSSGGSSGSETPGTSESATPESSGGSSGGSEIGKATAKYFFYSNIMNFFKTEITLANGEIRKRPLIETNGETGEIVWDKGRDFATVRKVLSMPQVNIVKKTEVQTGGFSKESILPKRNSDKLIARKKDWDPKKYGGFMQPTVAYSVLVVAKVEKGKSKKLKSVKELLGITIMERSSFEKNPIDFLEAKGYKEVKKDLIIKLPKYSLFELENGRKRMLASAKFLQKGNELALPSKYVNFLYLASHYEKLKGSPEDNEQKQLFVEQHKHYLDEIIEQISEFSKRVILADANLDKVLSAYNKHRDKPIREQAENIIHLFTLTNLGAPRAFKYFDTTIARKEYRSTKEVLDATLIHQSITGLYETRIDLSQLGGDGGSGGSGGSGGSGGSGGSGGMDKKYSIGLAIGTNSVGWAVITDEYKVPSKKFKVLGNTDRHSIKKNLIGALLFDSGETAEATRLKRTARRRYTRRKNRICYLQEIFSNEMAKVDDSFFHRLEESFLVEEDKKHERHPIFGNIVDEVAYHEKYPTIYHLRKKLVDSTDKADLRLIYLALAHMIKFRGHFLIEGDLNPDNSDVDKLFIQLVQTYNQLFEENPINASGVDAKAILSARLSKSRRLENLIAQLPGEKKNGLFGNLIALSLGLTPNFKSNFDLAEDAKLQLSKDTYDDDLDNLLAQIGDQYADLFLAAKNLSDAILLSDILRVNTEITKAPLSASMIKRYDEHHQDLTLLKALVRQQLPEKYKEIFFDQSKNGYAGYIDGGASQEEFYKFIKPILEKMDGTEELLVKLNREDLLRKQRTFDNGSIPHQIHLGELHAILRRQEDFYPFLKDNREKIEKILTFRIPYYVGPLARGNSRFAWMTRKSEETITPWNFEEVVDKGASAQSFIERMTNFDKNLPNEKVLPKHSLLYEYFTVYNELTKVKYVTEGMRKPAFLSGEQKKAIVDLLFKTNRKVTVKQLKEDYFKKIECFDSVEISGVEDRFNASLGTYHDLLKIIKDKDFLDNEENEDILEDIVLTLTLFEDREMIEERLKTYAHLFDDKVMKQLKRRRYTGWGRLSRKLINGIRDKQSGKTILDFLKSDGFANRNFMQLIHDDSLTFKEDIQKAQVSGQGDSLHEHIANLAGSPAIKKGILQTVKVVDELVKVMGRHKPENIVIEMARENQTTQKGQKNSRERMKRIEEGIKELGSQILKEHPVENTQLQNEKLYLYYLQNGRDMYVDQELDINRLSDYDVDHIVPQSFLKDDSIDNKVLTRSDKNRGKSDNVPSEEVVKKMKNYWRQLLNAKLITQRKFDNLTKAERGGLSELDKAGFIKRQLVETRQITKHVAQILDSRMNTKYDENDKLIREVKVITLKSKLVSDFRKDFQFYKVREINNYHHAHDAYLNAVVGTALIKKYPKLESEFVYGDYKVYDVRKMIAKSEQEGADKRTADGSEFESPKKKRKV

SEQ ID NO: 333 - protein, 1588 aa, synthetic construct
  REGION 1..1588: note = ABE8.8-m polypeptide sequence
  REGION 1..167: note = MISC_FEATURE - Adenosine deaminase sequence
  REGION 168..199: note = MISC_FEATURE - Linker sequence
  REGION 200..1566: note = MISC_FEATURE - Sequence derived from Cas9
  REGION 1567..1588: note = MISC_FEATURE - Bipartite nuclear localization sequence
MSEVEFSHEYWMRHALTLAKRARDEREVPVGAVLVLNNRVIGEGWNRAIGLHDPTAHAEIMALRQGGLVMQNYRLIDATLYVTFEPCVMCAGAMIHSRIGRVVFGVRNAKTGAAGSLMDVLHHPGMNHRVEITEGILADECAALLCRFFRMPRRVFNAQKKAQSSTDSGGSSGGSSGSETPGTSESATPESSGGSSGGSDKKYSIGLAIGTNSVGWAVITDEYKVPSKKFKVLGNTDRHSIKKNLIGALLFDSGETAEATRLKRTARRRYTRRKNRICYLQEIFSNEMAKVDDSFFHRLEESFLVEEDKKHERHPIFGNIVDEVAYHEKYPTIYHLRKKLVDSTDKADLRLIYLALAHMIKFRGHFLIEGDLNPDNSDVDKLFIQLVQTYNQLFEENPINASGVDAKAILSARLSKSRRLENLIAQLPGEKKNGLFGNLIALSLGLTPNFKSNFDLAEDAKLQLSKDTYDDDLDNLLAQIGDQYADLFLAAKNLSDAILLSDILRVNTEITKAPLSASMIKRYDEHHQDLTLLKALVRQQLPEKYKEIFFDQSKNGYAGYIDGGASQEEFYKFIKPILEKMDGTEELLVKLNREDLLRKQRTFDNGSIPHQIHLGELHAILRRQEDFYPFLKDNREKIEKILTFRIPYYVGPLARGNSRFAWMTRKSEETITPWNFEEVVDKGASAQSFIERMTNFDKNLPNEKVLPKHSLLYEYFTVYNELTKVKYVTEGMRKPAFLSGEQKKAIVDLLFKTNRKVTVKQLKEDYFKKIECFDSVEISGVEDRFNASLGTYHDLLKIIKDKDFLDNEENEDILEDIVLTLTLFEDREMIEERLKTYAHLFDDKVMKQLKRRRYTGWGRLSRKLINGIRDKQSGKTILDFLKSDGFANRNFMQLIHDDSLTFKEDIQKAQVSGQGDSLHEHIANLAGSPAIKKGILQTVKVVDELVKVMGRHKPENIVIEMARENQTTQKGQKNSRERMKRIEEGIKELGSQILKEHPVENTQLQNEKLYLYYLQNGRDMYVDQELDINRLSDYDVDHIVPQSFLKDDSIDNKVLTRSDKNRGKSDNVPSEEVVKKMKNYWRQLLNAKLITQRKFDNLTKAERGGLSELDKAGFIKRQLVETRQITKHVAQILDSRMNTKYDENDKLIREVKVITLKSKLVSDFRKDFQFYKVREINNYHHAHDAYLNAVVGTALIKKYPKLESEFVYGDYKVYDVRKMIAKSEQEIGKATAKYFFYSNIMNFFKTEITLANGEIRKRPLIETNGETGEIVWDKGRDFATVRKVLSMPQVNIVKKTEVQTGGFSKESILPKRNSDKLIARKKDWDPKKYGGFDSPTVAYSVLVVAKVEKGKSKKLKSVKELLGITIMERSSFEKNPIDFLEAKGYKEVKKDLIIKLPKYSLFELENGRKRMLASAGELQKGNELALPSKYVNFLYLASHYEKLKGSPEDNEQKQLFVEQHKHYLDEIIEQISEFSKRVILADANLDKVLSAYNKHRDKPIREQAENIIHLFTLTNLGAPAAFKYFDTTIDRKRYTSTKEVLDATLIHQSITGLYETRIDLSQLGGDEGADKRTADGSEFESPKKKRKV

SEQ ID NO: 334 - protein, 1786 aa, synthetic construct
  REGION 1..1786: note = ABE8.8-d polypeptide sequence
  REGION 1..167: note = MISC_FEATURE - Adenosine deaminase sequence
  REGION 168..199: note = MISC_FEATURE - Linker sequence
  REGION 200..365: note = MISC_FEATURE - Adenosine deaminase sequence
  REGION 366..397: note = MISC_FEATURE - Linker sequence
  REGION 398..1764: note = MISC_FEATURE - Sequence derived from Cas9
  REGION 1765..1786: note = MISC_FEATURE - Bipartite nuclear localization sequence
MSEVEFSHEYWMRHALTLAKRAWDEREVPVGAVLVHNNRVIGEGWNRPIGRHDPTAHAEIMALRQGGLVMQNYRLIDATLYVTLEPCVMCAGAMIHSRIGRVVFGARDAKTGAAGSLMDVLHHPGMNHRVEITEGILADECAALLSDFFRMRRQEIKAQKKAQSSTDSGGSSGGSSGSETPGTSESATPESSGGSSGGSSEVEFSHEYWMRHALTLAKRARDEREVPVGAVLVLNNRVIGEGWNRAIGLHDPTAHAEIMALRQGGLVMQNYRLIDATLYVTFEPCVMCAGAMIHSRIGRVVFGVRNAKTGAAGSLMDVLHHPGMNHRVEITEGILADECAALLCRFFRMPRRVFNAQKKAQSSTDSGGSSGGSSGSETPGTSESATPESSGGSSGGSDKKYSIGLAIGTNSVGWAVITDEYKVPSKKFKVLGNTDRHSIKKNLIGALLFDSGETAEATRLKRTARRRYTRRKNRICYLQEIFSNEMAKVDDSFFHRLEESFLVEEDKKHERHPIFGNIVDEVAYHEKYPTIYHLRKKLVDSTDKADLRLIYLALAHMIKFRGHFLIEGDLNPDNSDVDKLFIQLVQTYNQLFEENPINASGVDAKAILSARLSKSRRLENLIAQLPGEKKNGLFGNLIALSLGLTPNFKSNFDLAEDAKLQLSKDTYDDDLDNLLAQIGDQYADLFLAAKNLSDAILLSDILRVNTEITKAPLSASMIKRYDEHHQDLTLLKALVRQQLPEKYKEIFFDQSKNGYAGYIDGGASQEEFYKFIKPILEKMDGTEELLVKLNREDLLRKQRTFDNGSIPHQIHLGELHAILRRQEDFYPFLKDNREKIEKILTFRIPYYVGPLARGNSRFAWMTRKSEETITPWNFEEVVDKGASAQSFIERMTNFDKNLPNEKVLPKHSLLYEYFTVYNELTKVKYVTEGMRKPAFLSGEQKKAIVDLLFKTNRKVTVKQLKEDYFKKIECFDSVEISGVEDRFNASLGTYHDLLKIIKDKDFLDNEENEDILEDIVLTLTLFEDREMIEERLKTYAHLFDDKVMKQLKRRRYTGWGRLSRKLINGIRDKQSGKTILDFLKSDGFANRNFMQLIHDDSLTFKEDIQKAQVSGQGDSLHEHIANLAGSPAIKKGILQTVKVVDELVKVMGRHKPENIVIEMARENQTTQKGQKNSRERMKRIEEGIKELGSQILKEHPVENTQLQNEKLYLYYLQNGRDMYVDQELDINRLSDYDVDHIVPQSFLKDDSIDNKVLTRSDKNRGKSDNVPSEEVVKKMKNYWRQLLNAKLITQRKFDNLTKAERGGLSELDKAGFIKRQLVETRQITKHVAQILDSRMNTKYDENDKLIREVKVITLKSKLVSDFRKDFQFYKVREINNYHHAHDAYLNAVVGTALIKKYPKLESEFVYGDYKVYDVRKMIAKSEQEIGKATAKYFFYSNIMNFFKTEITLANGEIRKRPLIETNGETGEIVWDKGRDFATVRKVLSMPQVNIVKKTEVQTGGFSKESILPKRNSDKLIARKKDWDPKKYGGFDSPTVAYSVLVVAKVEKGKSKKLKSVKELLGITIMERSSFEKNPIDFLEAKGYKEVKKDLIIKLPKYSLFELENGRKRMLASAGELQKGNELALPSKYVNFLYLASHYEKLKGSPEDNEQKQLFVEQHKHYLDEIIEQISEFSKRVILADANLDKVLSAYNKHRDKPIREQAENIIHLFTLTNLGAPAAFKYFDTTIDRKRYTSTKEVLDATLIHQSITGLYETRIDLSQLGGDEGADKRTADGSEFESPKKKRKV

SEQ ID NO: 335 - protein, 1588 aa, synthetic construct
  REGION 1..1588: note = ABE8.13-m polypeptide sequence
  REGION 1..167: note = MISC_FEATURE - Adenosine deaminase sequence
  REGION 168..199: note = MISC_FEATURE - Linker sequence
  REGION 200..1566: note = MISC_FEATURE - Sequence derived from Cas9
  REGION 1567..1588: note = MISC_FEATURE - Bipartite nuclear localization sequence
MSEVEFSHEYWMRHALTLAKRARDEREVPVGAVLVLNNRVIGEGWNRAIGLHDPTAHAEIMALRQGGLVMQNYRLYDATLYVTFEPCVMCAGAMIHSRIGRVVFGVRNAKTGAAGSLMDVLHHPGMNHRVEITEGILADECAALLCRFFRMPRRVFNAQKKAQSSTDSGGSSGGSSGSETPGTSESATPESSGGSSGGSDKKYSIGLAIGTNSVGWAVITDEYKVPSKKFKVLGNTDRHSIKKNLIGALLFDSGETAEATRLKRTARRRYTRRKNRICYLQEIFSNEMAKVDDSFFHRLEESFLVEEDKKHERHPIFGNIVDEVAYHEKYPTIYHLRKKLVDSTDKADLRLIYLALAHMIKFRGHFLIEGDLNPDNSDVDKLFIQLVQTYNQLFEENPINASGVDAKAILSARLSKSRRLENLIAQLPGEKKNGLFGNLIALSLGLTPNFKSNFDLAEDAKLQLSKDTYDDDLDNLLAQIGDQYADLFLAAKNLSDAILLSDILRVNTEITKAPLSASMIKRYDEHHQDLTLLKALVRQQLPEKYKEIFFDQSKNGYAGYIDGGASQEEFYKFIKPILEKMDGTEELLVKLNREDLLRKQRTFDNGSIPHQIHLGELHAILRRQEDFYPFLKDNREKIEKILTFRIPYYVGPLARGNSRFAWMTRKSEETITPWNFEEVVDKGASAQSFIERMTNFDKNLPNEKVLPKHSLLYEYFTVYNELTKVKYVTEGMRKPAFLSGEQKKAIVDLLFKTNRKVTVKQLKEDYFKKIECFDSVEISGVEDRFNASLGTYHDLLKIIKDKDFLDNEENEDILEDIVLTLTLFEDREMIEERLKTYAHLFDDKVMKQLKRRRYTGWGRLSRKLINGIRDKQSGKTILDFLKSDGFANRNFMQLIHDDSLTFKEDIQKAQVSGQGDSLHEHIANLAGSPAIKKGILQTVKVVDELVKVMGRHKPENIVIEMARENQTTQKGQKNSRERMKRIEEGIKELGSQILKEHPVENTQLQNEKLYLYYLQNGRDMYVDQELDINRLSDYDVDHIVPQSFLKDDSIDNKVLTRSDKNRGKSDNVPSEEVVKKMKNYWRQLLNAKLITQRKFDNLTKAERGGLSELDKAGFIKRQLVETRQITKHVAQILDSRMNTKYDENDKLIREVKVITLKSKLVSDFRKDFQFYKVREINNYHHAHDAYLNAVVGTALIKKYPKLESEFVYGDYKVYDVRKMIAKSEQEIGKATAKYFFYSNIMNFFKTEITLANGEIRKRPLIETNGETGEIVWDKGRDFATVRKVLSMPQVNIVKKTEVQTGGFSKESILPKRNSDKLIARKKDWDPKKYGGFDSPTVAYSVLVVAKVEKGKSKKLKSVKELLGITIMERSSFEKNPIDFLEAKGYKEVKKDLIIKLPKYSLFELENGRKRMLASAGELQKGNELALPSKYVNFLYLASHYEKLKGSPEDNEQKQLFVEQHKHYLDEIIEQISEFSKRVILADANLDKVLSAYNKHRDKPIREQAENIIHLFTLTNLGAPAAFKYFDTTIDRKRYTSTKEVLDATLIHQSITGLYETRIDLSQLGGDEGADKRTADGSEFESPKKKRKV

SEQ ID NO: 336 - protein, 1786 aa, synthetic construct
  REGION 1..1786: note = ABE8.13-d polypeptide sequence
  REGION 1..167: note = MISC_FEATURE - Adenosine deaminase sequence
  REGION 168..199: note = MISC_FEATURE - Linker sequence
  REGION 200..365: note = MISC_FEATURE - Adenosine deaminase sequence
  REGION 366..397: note = MISC_FEATURE - Linker sequence
  REGION 398..1764: note = MISC_FEATURE - Sequence derived from Cas9
  REGION 1765..1786: note = MISC_FEATURE - Bipartite nuclear localization sequence
MSEVEFSHEYWMRHALTLAKRAWDEREVPVGAVLVHNNRVIGEGWNRPIGRHDPTAHAEIMALRQGGLVMQNYRLIDATLYVTLEPCVMCAGAMIHSRIGRVVFGARDAKTGAAGSLMDVLHHPGMNHRVEITEGILADECAALLSDFFRMRRQEIKAQKKAQSSTDSGGSSGGSSGSETPGTSESATPESSGGSSGGSSEVEFSHEYWMRHALTLAKRARDEREVPVGAVLVLNNRVIGEGWNRAIGLHDPTAHAEIMALRQGGLVMQNYRLYDATLYVTFEPCVMCAGAMIHSRIGRVVFGVRNAKTGAAGSLMDVLHHPGMNHRVEITEGILADECAALLCRFFRMPRRVFNAQKKAQSSTDSGGSSGGSSGSETPGTSESATPESSGGSSGGSDKKYSIGLAIGTNSVGWAVITDEYKVPSKKFKVLGNTDRHSIKKNLIGALLFDSGETAEATRLKRTARRRYTRRKNRICYLQEIFSNEMAKVDDSFFHRLEESFLVEEDKKHERHPIFGNIVDEVAYHEKYPTIYHLRKKLVDSTDKADLRLIYLALAHMIKFRGHFLIEGDLNPDNSDVDKLFIQLVQTYNQLFEENPINASGVDAKAILSARLSKSRRLENLIAQLPGEKKNGLFGNLIALSLGLTPNFKSNFDLAEDAKLQLSKDTYDDDLDNLLAQIGDQYADLFLAAKNLSDAILLSDILRVNTEITKAPLSASMIKRYDEHHQDLTLLKALVRQQLPEKYKEIFFDQSKNGYAGYIDGGASQEEFYKFIKPILEKMDGTEELLVKLNREDLLRKQRTFDNGSIPHQIHLGELHAILRRQEDFYPFLKDNREKIEKILTFRIPYYVGPLARGNSRFAWMTRKSEETITPWNFEEVVDKGASAQSFIERMTNFDKNLPNEKVLPKHSLLYEYFTVYNELTKVKYVTEGMRKPAFLSGEQKKAIVDLLFKTNRKVTVKQLKEDYFKKIECFDSVEISGVEDRFNASLGTYHDLLKIIKDKDFLDNEENEDILEDIVLTLTLFEDREMIEERLKTYAHLFDDKVMKQLKRRRYTGWGRLSRKLINGIRDKQSGKTILDFLKSDGFANRNFMQLIHDDSLTFKEDIQKAQVSGQGDSLHEHIANLAGSPAIKKGILQTVKVVDELVKVMGRHKPENIVIEMARENQTTQKGQKNSRERMKRIEEGIKELGSQILKEHPVENTQLQNEKLYLYYLQNGRDMYVDQELDINRLSDYDVDHIVPQSFLKDDSIDNKVLTRSDKNRGKSDNVPSEEVVKKMKNYWRQLLNAKLITQRKFDNLTKAERGGLSELDKAGFIKRQLVETRQITKHVAQILDSRMNTKYDENDKLIREVKVITLKSKLVSDFRKDFQFYKVREINNYHHAHDAYLNAVVGTALIKKYPKLESEFVYGDYKVYDVRKMIAKSEQEIGKATAKYFFYSNIMNFFKTEITLANGEIRKRPLIETNGETGEIVWDKGRDFATVRKVLSMPQVNIVKKTEVQTGGFSKESILPKRNSDKLIARKKDWDPKKYGGFDSPTVAYSVLVVAKVEKGKSKKLKSVKELLGITIMERSSFEKNPIDFLEAKGYKEVKKDLIIKLPKYSLFELENGRKRMLASAGELQKGNELALPSKYVNFLYLASHYEKLKGSPEDNEQKQLFVEQHKHYLDEIIEQISEFSKRVILADANLDKVLSAYNKHRDKPIREQAENIIHLFTLTNLGAPAAFKYFDTTIDRKRYTSTKEVLDATLIHQSITGLYETRIDLSQLGGDEGADKRTADGSEFESPKKKRKV

SEQ ID NO: 337 - protein, 1588 aa, synthetic construct
  REGION 1..1588: note = ABE8.17-m polypeptide sequence
  REGION 1..167: note = MISC_FEATURE - Adenosine deaminase sequence
  REGION 168..199: note = MISC_FEATURE - Linker sequence
  REGION 200..1566: note = MISC_FEATURE - Sequence derived from Cas9
  REGION 1567..1588: note = MISC_FEATURE - Bipartite nuclear localization sequence
MSEVEFSHEYWMRHALTLAKRARDEREVPVGAVLVLNNRVIGEGWNRAIGLHDPTAHAEIMALRQGGLVMQNYRLIDATLYSTFEPCVMCAGAMIHSRIGRVVFGVRNAKTGAAGSLMDVLHYPGMNHRVEITEGILADECAALLCYFFRMPRRVFNAQKKAQSSTDSGGSSGGSSGSETPGTSESATPESSGGSSGGSDKKYSIGLAIGTNSVGWAVITDEYKVPSKKFKVLGNTDRHSIKKNLIGALLFDSGETAEATRLKRTARRRYTRRKNRICYLQEIFSNEMAKVDDSFFHRLEESFLVEEDKKHERHPIFGNIVDEVAYHEKYPTIYHLRKKLVDSTDKADLRLIYLALAHMIKFRGHFLIEGDLNPDNSDVDKLFIQLVQTYNQLFEENPINASGVDAKAILSARLSKSRRLENLIAQLPGEKKNGLFGNLIALSLGLTPNFKSNFDLAEDAKLQLSKDTYDDDLDNLLAQIGDQYADLFLAAKNLSDAILLSDILRVNTEITKAPLSASMIKRYDEHHQDLTLLKALVRQQLPEKYKEIFFDQSKNGYAGYIDGGASQEEFYKFIKPILEKMDGTEELLVKLNREDLLRKQRTFDNGSIPHQIHLGELHAILRRQEDFYPFLKDNREKIEKILTFRIPYYVGPLARGNSRFAWMTRKSEETITPWNFEEVVDKGASAQSFIERMTNFDKNLPNEKVLPKHSLLYEYFTVYNELTKVKYVTEGMRKPAFLSGEQKKAIVDLLFKTNRKVTVKQLKEDYFKKIECFDSVEISGVEDRFNASLGTYHDLLKIIKDKDFLDNEENEDILEDIVLTLTLFEDREMIEERLKTYAHLFDDKVMKQLKRRRYTGWGRLSRKLINGIRDKQSGKTILDFLKSDGFANRNFMQLIHDDSLTFKEDIQKAQVSGQGDSLHEHIANLAGSPAIKKGILQTVKVVDELVKVMGRHKPENIVIEMARENQTTQKGQKNSRERMKRIEEGIKELGSQILKEHPVENTQLQNEKLYLYYLQNGRDMYVDQELDINRLSDYDVDHIVPQSFLKDDSIDNKVLTRSDKNRGKSDNVPSEEVVKKMKNYWRQLLNAKLITQRKFDNLTKAERGGLSELDKAGFIKRQLVETRQITKHVAQILDSRMNTKYDENDKLIREVKVITLKSKLVSDFRKDFQFYKVREINNYHHAHDAYLNAVVGTALIKKYPKLESEFVYGDYKVYDVRKMIAKSEQEIGKATAKYFFYSNIMNFFKTEITLANGEIRKRPLIETNGETGEIVWDKGRDFATVRKVLSMPQVNIVKKTEVQTGGFSKESILPKRNSDKLIARKKDWDPKKYGGFDSPTVAYSVLVVAKVEKGKSKKLKSVKELLGITIMERSSFEKNPIDFLEAKGYKEVKKDLIIKLPKYSLFELENGRKRMLASAGELQKGNELALPSKYVNFLYLASHYEKLKGSPEDNEQKQLFVEQHKHYLDEIIEQISEFSKRVILADANLDKVLSAYNKHRDKPIREQAENIIHLFTLTNLGAPAAFKYFDTTIDRKRYTSTKEVLDATLIHQSITGLYETRIDLSQLGGDEGADKRTADGSEFESPKKKRKV

SEQ ID NO: 338 - protein, 1786 aa, synthetic construct
  REGION 1..1786: note = ABE8.17-d polypeptide sequence
  REGION 1..167: note = MISC_FEATURE - Adenosine deaminase sequence
  REGION 168..199: note = MISC_FEATURE - Linker sequence
  REGION 200..365: note = MISC_FEATURE - Adenosine deaminase sequence
  REGION 366..397: note = MISC_FEATURE - Linker sequence
  REGION 398..1764: note = MISC_FEATURE - Sequence derived from Cas9
  REGION 1765..1786: note = MISC_FEATURE - Bipartite nuclear localization sequence
MSEVEFSHEYWMRHALTLAKRAWDEREVPVGAVLVHNNRVIGEGWNRPIGRHDPTAHAEIMALRQGGLVMQNYRLIDATLYVTLEPCVMCAGAMIHSRIGRVVFGARDAKTGAAGSLMDVLHHPGMNHRVEITEGILADECAALLSDFFRMRRQEIKAQKKAQSSTDSGGSSGGSSGSETPGTSESATPESSGGSSGGSSEVEFSHEYWMRHALTLAKRARDEREVPVGAVLVLNNRVIGEGWNRAIGLHDPTAHAEIMALRQGGLVMQNYRLIDATLYSTFEPCVMCAGAMIHSRIGRVVFGVRNAKTGAAGSLMDVLHYPGMNHRVEITEGILADECAALLCYFFRMPRRVFNAQKKAQSSTDSGGSSGGSSGSETPGTSESATPESSGGSSGGSDKKYSIGLAIGTNSVGWAVITDEYKVPSKKFKVLGNTDRHSIKKNLIGALLFDSGETAEATRLKRTARRRYTRRKNRICYLQEIFSNEMAKVDDSFFHRLEESFLVEEDKKHERHPIFGNIVDEVAYHEKYPTIYHLRKKLVDSTDKADLRLIYLALAHMIKFRGHFLIEGDLNPDNSDVDKLFIQLVQTYNQLFEENPINASGVDAKAILSARLSKSRRLENLIAQLPGEKKNGLFGNLIALSLGLTPNFKSNFDLAEDAKLQLSKDTYDDDLDNLLAQIGDQYADLFLAAKNLSDAILLSDILRVNTEITKAPLSASMIKRYDEHHQDLTLLKALVRQQLPEKYKEIFFDQSKNGYAGYIDGGASQEEFYKFIKPILEKMDGTEELLVKLNREDLLRKQRTFDNGSIPHQIHLGELHAILRRQEDFYPFLKDNREKIEKILTFRIPYYVGPLARGNSRFAWMTRKSEETITPWNFEEVVDKGASAQSFIERMTNFDKNLPNEKVLPKHSLLYEYFTVYNELTKVKYVTEGMRKPAFLSGEQKKAIVDLLFKTNRKVTVKQLKEDYFKKIECFDSVEISGVEDRFNASLGTYHDLLKIIKDKDFLDNEENEDILEDIVLTLTLFEDREMIEERLKTYAHLFDDKVMKQLKRRRYTGWGRLSRKLINGIRDKQSGKTILDFLKSDGFANRNFMQLIHDDSLTFKEDIQKAQVSGQGDSLHEHIANLAGSPAIKKGILQTVKVVDELVKVMGRHKPENIVIEMARENQTTQKGQKNSRERMKRIEEGIKELGSQILKEHPVENTQLQNEKLYLYYLQNGRDMYVDQELDINRLSDYDVDHIVPQSFLKDDSIDNKVLTRSDKNRGKSDNVPSEEVVKKMKNYWRQLLNAKLITQRKFDNLTKAERGGLSELDKAGFIKRQLVETRQITKHVAQILDSRMNTKYDENDKLIREVKVITLKSKLVSDFRKDFQFYKVREINNYHHAHDAYLNAVVGTALIKKYPKLESEFVYGDYKVYDVRKMIAKSEQEIGKATAKYFFYSNIMNFFKTEITLANGEIRKRPLIETNGETGEIVWDKGRDFATVRKVLSMPQVNIVKKTEVQTGGFSKESILPKRNSDKLIARKKDWDPKKYGGFDSPTVAYSVLVVAKVEKGKSKKLKSVKELLGITIMERSSFEKNPIDFLEAKGYKEVKKDLIIKLPKYSLFELENGRKRMLASAGELQKGNELALPSKYVNFLYLASHYEKLKGSPEDNEQKQLFVEQHKHYLDEIIEQISEFSKRVILADANLDKVLSAYNKHRDKPIREQAENIIHLFTLTNLGAPAAFKYFDTTIDRKRYTSTKEVLDATLIHQSITGLYETRIDLSQLGGDEGADKRTADGSEFESPKKKRKV

SEQ ID NO: 339 - protein, 1588 aa, synthetic construct
  REGION 1..1588: note = ABE8.20-m polypeptide sequence
  REGION 1..167: note = MISC_FEATURE - Adenosine deaminase sequence
  REGION 168..199: note = MISC_FEATURE - Linker sequence
  REGION 200..1566: note = MISC_FEATURE - Sequence derived from Cas9
  REGION 1567..1588: note = MISC_FEATURE - Bipartite nuclear localization sequence
MSEVEFSHEYWMRHALTLAKRARDEREVPVGAVLVLNNRVIGEGWNRAIGLHDPTAHAEIMALRQGGLVMQNYRLYDATLYSTFEPCVMCAGAMIHSRIGRVVFGVRNAKTGAAGSLMDVLHHPGMNHRVEITEGILADECAALLCRFFRMPRRVFNAQKKAQSSTDSGGSSGGSSGSETPGTSESATPESSGGSSGGSDKKYSIGLAIGTNSVGWAVITDEYKVPSKKFKVLGNTDRHSIKKNLIGALLFDSGETAEATRLKRTARRRYTRRKNRICYLQEIFSNEMAKVDDSFFHRLEESFLVEEDKKHERHPIFGNIVDEVAYHEKYPTIYHLRKKLVDSTDKADLRLIYLALAHMIKFRGHFLIEGDLNPDNSDVDKLFIQLVQTYNQLFEENPINASGVDAKAILSARLSKSRRLENLIAQLPGEKKNGLFGNLIALSLGLTPNFKSNFDLAEDAKLQLSKDTYDDDLDNLLAQIGDQYADLFLAAKNLSDAILLSDILRVNTEITKAPLSASMIKRYDEHHQDLTLLKALVRQQLPEKYKEIFFDQSKNGYAGYIDGGASQEEFYKFIKPILEKMDGTEELLVKLNREDLLRKQRTFDNGSIPHQIHLGELHAILRRQEDFYPFLKDNREKIEKILTFRIPYYVGPLARGNSRFAWMTRKSEETITPWNFEEVVDKGASAQSFIERMTNFDKNLPNEKVLPKHSLLYEYFTVYNELTKVKYVTEGMRKPAFLSGEQKKAIVDLLFKTNRKVTVKQLKEDYFKKIECFDSVEISGVEDRFNASLGTYHDLLKIIKDKDFLDNEENEDILEDIVLTLTLFEDREMIEERLKTYAHLFDDKVMKQLKRRRYTGWGRLSRKLINGIRDKQSGKTILDFLKSDGFANRNFMQLIHDDSLTFKEDIQKAQVSGQGDSLHEHIANLAGSPAIKKGILQTVKVVDELVKVMGRHKPENIVIEMARENQTTQKGQKNSRERMKRIEEGIKELGSQILKEHPVENTQLQNEKLYLYYLQNGRDMYVDQELDINRLSDYDVDHIVPQSFLKDDSIDNKVLTRSDKNRGKSDNVPSEEVVKKMKNYWRQLLNAKLITQRKFDNLTKAERGGLSELDKAGFIKRQLVETRQITKHVAQILDSRMNTKYDENDKLIREVKVITLKSKLVSDFRKDFQFYKVREINNYHHAHDAYLNAVVGTALIKKYPKLESEFVYGDYKVYDVRKMIAKSEQEIGKATAKYFFYSNIMNFFKTEITLANGEIRKRPLIETNGETGEIVWDKGRDFATVRKVLSMPQVNIVKKTEVQTGGFSKESILPKRNSDKLIARKKDWDPKKYGGFDSPTVAYSVLVVAKVEKGKSKKLKSVKELLGITIMERSSFEKNPIDFLEAKGYKEVKKDLIIKLPKYSLFELENGRKRMLASAGELQKGNELALPSKYVNFLYLASHYEKLKGSPEDNEQKQLFVEQHKHYLDEIIEQISEFSKRVILADANLDKVLSAYNKHRDKPIREQAENIIHLFTLTNLGAPAAFKYFDTTIDRKRYTSTKEVLDATLIHQSITGLYETRIDLSQLGGDEGADKRTADGSEFESPKKKRKV

SEQ ID NO: 340 - protein, 1786 aa, synthetic construct
  REGION 1..1786: note = ABE8.20-d polypeptide sequence
  REGION 1..167: note = MISC_FEATURE - Adenosine deaminase sequence
  REGION 168..199: note = MISC_FEATURE - Linker sequence
  REGION 200..365: note = MISC_FEATURE - Adenosine deaminase sequence
  REGION 366..397: note = MISC_FEATURE - Linker sequence
  REGION 398..1764: note = MISC_FEATURE - Sequence derived from Cas9
  REGION 1765..1786: note = MISC_FEATURE - Bipartite nuclear localization sequence
MSEVEFSHEYWMRHALTLAKRAWDEREVPVGAVLVHNNRVIGEGWNRPIGRHDPTAHAEIMALRQGGLVMQNYRLIDATLYVTLEPCVMCAGAMIHSRIGRVVFGARDAKTGAAGSLMDVLHHPGMNHRVEITEGILADECAALLSDFFRMRRQEIKAQKKAQSSTDSGGSSGGSSGSETPGTSESATPESSGGSSGGSSEVEFSHEYWMRHALTLAKRARDEREVPVGAVLVLNNRVIGEGWNRAIGLHDPTAHAEIMALRQGGLVMQNYRLYDATLYSTFEPCVMCAGAMIHSRIGRVVFGVRNAKTGAAGSLMDVLHHPGMNHRVEITEGILADECAALLCRFFRMPRRVFNAQKKAQSSTDSGGSSGGSSGSETPGTSESATPESSGGSSGGSDKKYSIGLAIGTNSVGWAVITDEYKVPSKKFKVLGNTDRHSIKKNLIGALLFDSGETAEATRLKRTARRRYTRRKNRICYLQEIFSNEMAKVDDSFFHRLEESFLVEEDKKHERHPIFGNIVDEVAYHEKYPTIYHLRKKLVDSTDKADLRLIYLALAHMIKFRGHFLIEGDLNPDNSDVDKLFIQLVQTYNQLFEENPINASGVDAKAILSARLSKSRRLENLIAQLPGEKKNGLFGNLIALSLGLTPNFKSNFDLAEDAKLQLSKDTYDDDLDNLLAQIGDQYADLFLAAKNLSDAILLSDILRVNTEITKAPLSASMIKRYDEHHQDLTLLKALVRQQLPEKYKEIFFDQSKNGYAGYIDGGASQEEFYKFIKPILEKMDGTEELLVKLNREDLLRKQRTFDNGSIPHQIHLGELHAILRRQEDFYPFLKDNREKIEKILTFRIPYYVGPLARGNSRFAWMTRKSEETITPWNFEEVVDKGASAQSFIERMTNFDKNLPNEKVLPKHSLLYEYFTVYNELTKVKYVTEGMRKPAFLSGEQKKAIVDLLFKTNRKVTVKQLKEDYFKKIECFDSVEISGVEDRFNASLGTYHDLLKIIKDKDFLDNEENEDILEDIVLTLTLFEDREMIEERLKTYAHLFDDKVMKQLKRRRYTGWGRLSRKLINGIRDKQSGKTILDFLKSDGFANRNFMQLIHDDSLTFKEDIQKAQVSGQGDSLHEHIANLAGSPAIKKGILQTVKVVDELVKVMGRHKPENIVIEMARENQTTQKGQKNSRERMKRIEEGIKELGSQILKEHPVENTQLQNEKLYLYYLQNGRDMYVDQELDINRLSDYDVDHIVPQSFLKDDSIDNKVLTRSDKNRGKSDNVPSEEVVKKMKNYWRQLLNAKLITQRKFDNLTKAERGGLSELDKAGFIKRQLVETRQITKHVAQILDSRMNTKYDENDKLIREVKVITLKSKLVSDFRKDFQFYKVREINNYHHAHDAYLNAVVGTALIKKYPKLESEFVYGDYKVYDVRKMIAKSEQEIGKATAKYFFYSNIMNFFKTEITLANGEIRKRPLIETNGETGEIVWDKGRDFATVRKVLSMPQVNIVKKTEVQTGGFSKESILPKRNSDKLIARKKDWDPKKYGGFDSPTVAYSVLVVAKVEKGKSKKLKSVKELLGITIMERSSFEKNPIDFLEAKGYKEVKKDLIIKLPKYSLFELENGRKRMLASAGELQKGNELALPSKYVNFLYLASHYEKLKGSPEDNEQKQLFVEQHKHYLDEIIEQISEFSKRVILADANLDKVLSAYNKHRDKPIREQAENIIHLFTLTNLGAPAAFKYFDTTIDRKRYTSTKEVLDATLIHQSITGLYETRIDLSQLGGDEGADKRTADGSEFESPKKKRKV

SEQ ID NO: 341 - protein, 1588 aa, synthetic construct
  REGION 1..1588: note = 01. monoABE8.1_bpNLS + Y147T polypeptide sequence
MSEVEFSHEYWMRHALTLAKRARDEREVPVGAVLVLNNRVIGEGWNRAIGLHDPTAHAEIMALRQGGLVMQNYRLIDATLYVTFEPCVMCAGAMIHSRIGRVVFGVRNAKTGAAGSLMDVLHYPGMNHRVEITEGILADECAALLCTFFRMPRQVFNAQKKAQSSTDSGGSSGGSSGSETPGTSESATPESSGGSSGGSDKKYSIGLAIGTNSVGWAVITDEYKVPSKKFKVLGNTDRHSIKKNLIGALLFDSGETAEATRLKRTARRRYTRRKNRICYLQEIFSNEMAKVDDSFFHRLEESFLVEEDKKHERHPIFGNIVDEVAYHEKYPTIYHLRKKLVDSTDKADLRLIYLALAHMIKFRGHFLIEGDLNPDNSDVDKLFIQLVQTYNQLFEENPINASGVDAKAILSARLSKSRRLENLIAQLPGEKKNGLFGNLIALSLGLTPNFKSNFDLAEDAKLQLSKDTYDDDLDNLLAQIGDQYADLFLAAKNLSDAILLSDILRVNTEITKAPLSASMIKRYDEHHQDLTLLKALVRQQLPEKYKEIFFDQSKNGYAGYIDGGASQEEFYKFIKPILEKMDGTEELLVKLNREDLLRKQRTFDNGSIPHQIHLGELHAILRRQEDFYPFLKDNREKIEKILTFRIPYYVGPLARGNSRFAWMTRKSEETITPWNFEEVVDKGASAQSFIERMTNFDKNLPNEKVLPKHSLLYEYFTVYNELTKVKYVTEGMRKPAFLSGEQKKAIVDLLFKTNRKVTVKQLKEDYFKKIECFDSVEISGVEDRFNASLGTYHDLLKIIKDKDFLDNEENEDILEDIVLTLTLFEDREMIEERLKTYAHLFDDKVMKQLKRRRYTGWGRLSRKLINGIRDKQSGKTILDFLKSDGFANRNFMQLIHDDSLTFKEDIQKAQVSGQGDSLHEHIANLAGSPAIKKGILQTVKVVDELVKVMGRHKPENIVIEMARENQTTQKGQKNSRERMKRIEEGIKELGSQILKEHPVENTQLQNEKLYLYYLQNGRDMYVDQELDINRLSDYDVDHIVPQSFLKDDSIDNKVLTRSDKNRGKSDNVPSEEVVKKMKNYWRQLLNAKLITQRKFDNLTKAERGGLSELDKAGFIKRQLVETRQITKHVAQILDSRMNTKYDENDKLIREVKVITLKSKLVSDFRKDFQFYKVREINNYHHAHDAYLNAVVGTALIKKYPKLESEFVYGDYKVYDVRKMIAKSEQEIGKATAKYFFYSNIMNFFKTEITLANGEIRKRPLIETNGETGEIVWDKGRDFATVRKVLSMPQVNIVKKTEVQTGGFSKESILPKRNSDKLIARKKDWDPKKYGGFVSPTVAYSVLVVAKVEKGKSKKLKSVKELLGITIMERSSFEKNPIDFLEAKGYKEVKKDLIIKLPKYSLFELENGRKRMLASARELQKGNELALPSKYVNFLYLASHYEKLKGSPEDNEQKQLFVEQHKHYLDEIIEQISEFSKRVILADANLDKVLSAYNKHRDKPIREQAENIIHLFTLTNLGAPAAFKYFDTTIDRKQYRSTKEVLDATLIHQSITGLYETRIDLSQLGGDEGADKRTADGSEFESPKKKRKV

SEQ ID NO: 342 - protein, 1588 aa, synthetic construct
  REGION 1..1588: note = 02. monoABE8.1_bpNLS + Y147R polypeptide sequence
MSEVEFSHEYWMRHALTLAKRARDEREVPVGAVLVLNNRVIGEGWNRAIGLHDPTAHAEIMALRQGGLVMQNYRLIDATLYVTFEPCVMCAGAMIHSRIGRVVFGVRNAKTGAAGSLMDVLHYPGMNHRVEITEGILADECAALLCRFFRMPRQVFNAQKKAQSSTDSGGSSGGSSGSETPGTSESATPESSGGSSGGSDKKYSIGLAIGTNSVGWAVITDEYKVPSKKFKVLGNTDRHSIKKNLIGALLFDSGETAEATRLKRTARRRYTRRKNRICYLQEIFSNEMAKVDDSFFHRLEESFLVEEDKKHERHPIFGNIVDEVAYHEKYPTIYHLRKKLVDSTDKADLRLIYLALAHMIKFRGHFLIEGDLNPDNSDVDKLFIQLVQTYNQLFEENPINASGVDAKAILSARLSKSRRLENLIAQLPGEKKNGLFGNLIALSLGLTPNFKSNFDLAEDAKLQLSKDTYDDDLDNLLAQIGDQYADLFLAAKNLSDAILLSDILRVNTEITKAPLSASMIKRYDEHHQDLTLLKALVRQQLPEKYKEIFFDQSKNGYAGYIDGGASQEEFYKFIKPILEKMDGTEELLVKLNREDLLRKQRTFDNGSIPHQIHLGELHAILRRQEDFYPFLKDNREKIEKILTFRIPYYVGPLARGNSRFAWMTRKSEETITPWNFEEVVDKGASAQSFIERMTNFDKNLPNEKVLPKHSLLYEYFTVYNELTKVKYVTEGMRKPAFLSGEQKKAIVDLLFKTNRKVTVKQLKEDYFKKIECFDSVEISGVEDRFNASLGTYHDLLKIIKDKDFLDNEENEDILEDIVLTLTLFEDREMIEERLKTYAHLFDDKVMKQLKRRRYTGWGRLSRKLINGIRDKQSGKTILDFLKSDGFANRNFMQLIHDDSLTFKEDIQKAQVSGQGDSLHEHIANLAGSPAIKKGILQTVKVVDELVKVMGRHKPENIVIEMARENQTTQKGQKNSRERMKRIEEGIKELGSQILKEHPVENTQLQNEKLYLYYLQNGRDMYVDQELDINRLSDYDVDHIVPQSFLKDDSIDNKVLTRSDKNRGKSDNVPSEEVVKKMKNYWRQLLNAKLITQRKFDNLTKAERGGLSELDKAGFIKRQLVETRQITKHVAQILDSRMNTKYDENDKLIREVKVITLKSKLVSDFRKDFQFYKVREINNYHHAHDAYLNAVVGTALIKKYPKLESEFVYGDYKVYDVRKMIAKSEQEIGKATAKYFFYSNIMNFFKTEITLANGEIRKRPLIETNGETGEIVWDKGRDFATVRKVLSMPQVNIVKKTEVQTGGFSKESILPKRNSDKLIARKKDWDPKKYGGFVSPTVAYSVLVVAKVEKGKSKKLKSVKELLGITIMERSSFEKNPIDFLEAKGYKEVKKDLIIKLPKYSLFELENGRKRMLASARELQKGNELALPSKYVNFLYLASHYEKLKGSPEDNEQKQLFVEQHKHYLDEIIEQISEFSKRVILADANLDKVLSAYNKHRDKPIREQAENIIHLFTLTNLGAPAAFKYFDTTIDRKQYRSTKEVLDATLIHQSITGLYETRIDLSQLGGDEGADKRTADGSEFESPKKKRKV

SEQ ID NO: 343 - protein, 1588 aa, synthetic construct
  REGION 1..1588: note = 03. monoABE8.1_bpNLS + Q154S polypeptide sequence
MSEVEFSHEYWMRHALTLAKRARDEREVPVGAVLVLNNRVIGEGWNRAIGLHDPTAHAEIMALRQGGLVMQNYRLIDATLYVTFEPCVMCAGAMIHSRIGRVVFGVRNAKTGAAGSLMDVLHYPGMNHRVEITEGILADECAALLCYFFRMPRSVFNAQKKAQSSTDSGGSSGGSSGSETPGTSESATPESSGGSSGGSDKKYSIGLAIGTNSVGWAVITDEYKVPSKKFKVLGNTDRHSIKKNLIGALLFDSGETAEATRLKRTARRRYTRRKNRICYLQEIFSNEMAKVDDSFFHRLEESFLVEEDKKHERHPIFGNIVDEVAYHEKYPTIYHLRKKLVDSTDKADLRLIYLALAHMIKFRGHFLIEGDLNPDNSDVDKLFIQLVQTYNQLFEENPINASGVDAKAILSARLSKSRRLENLIAQLPGEKKNGLFGNLIALSLGLTPNFKSNFDLAEDAKLQLSKDTYDDDLDNLLAQIGDQYADLFLAAKNLSDAILLSDILRVNTEITKAPLSASMIKRYDEHHQDLTLLKALVRQQLPEKYKEIFFDQSKNGYAGYIDGGASQEEFYKFIKPILEKMDGTEELLVKLNREDLLRKQRTFDNGSIPHQIHLGELHAILRRQEDFYPFLKDNREKIEKILTFRIPYYVGPLARGNSRFAWMTRKSEETITPWNFEEVVDKGASAQSFIERMTNFDKNLPNEKVLPKHSLLYEYFTVYNELTKVKYVTEGMRKPAFLSGEQKKAIVDLLFKTNRKVTVKQLKEDYFKKIECFDSVEISGVEDRFNASLGTYHDLLKIIKDKDFLDNEENEDILEDIVLTLTLFEDREMIEERLKTYAHLFDDKVMKQLKRRRYTGWGRLSRKLINGIRDKQSGKTILDFLKSDGFANRNFMQLIHDDSLTFKEDIQKAQVSGQGDSLHEHIANLAGSPAIKKGILQTVKVVDELVKVMGRHKPENIVIEMARENQTTQKGQKNSRERMKRIEEGIKELGSQILKEHPVENTQLQNEKLYLYYLQNGRDMYVDQELDINRLSDYDVDHIVPQSFLKDDSIDNKVLTRSDKNRGKSDNVPSEEVVKKMKNYWRQLLNAKLITQRKFDNLTKAERGGLSELDKAGFIKRQLVETRQITKHVAQILDSRMNTKYDENDKLIREVKVITLKSKLVSDFRKDFQFYKVREINNYHHAHDAYLNAVVGTALIKKYPKLESEFVYGDYKVYDVRKMIAKSEQEIGKATAKYFFYSNIMNFFKTEITLANGEIRKRPLIETNGETGEIVWDKGRDFATVRKVLSMPQVNIVKKTEVQTGGFSKESILPKRNSDKLIARKKDWDPKKYGGFVSPTVAYSVLVVAKVEKGKSKKLKSVKELLGITIMERSSFEKNPIDFLEAKGYKEVKKDLIIKLPKYSLFELENGRKRMLASARELQKGNELALPSKYVNFLYLASHYEKLKGSPEDNEQKQLFVEQHKHYLDEIIEQISEFSKRVILADANLDKVLSAYNKHRDKPIREQAENIIHLFTLTNLGAPAAFKYFDTTIDRKQYRSTKEVLDATLIHQSITGLYETRIDLSQLGGDEGADKRTADGSEFESPKKKRKV

SEQ ID NO: 344 - protein, 1588 aa, synthetic construct
  REGION 1..1588: note = 04. monoABE8.1_bpNLS + Y123H polypeptide sequence
MSEVEFSHEYWMRHALTLAKRARDEREVPVGAVLVLNNRVIGEGWNRAIGLHDPTAHAEIMALRQGGLVMQNYRLIDATLYVTFEPCVMCAGAMIHSRIGRVVFGVRNAKTGAAGSLMDVLHHPGMNHRVEITEGILADECAALLCYFFRMPRQVFNAQKKAQSSTDSGGSSGGSSGSETPGTSESATPESSGGSSGGSDKKYSIGLAIGTNSVGWAVITDEYKVPSKKFKVLGNTDRHSIKKNLIGALLFDSGETAEATRLKRTARRRYTRRKNRICYLQEIFSNEMAKVDDSFFHRLEESFLVEEDKKHERHPIFGNIVDEVAYHEKYPTIYHLRKKLVDSTDKADLRLIYLALAHMIKFRGHFLIEGDLNPDNSDVDKLFIQLVQTYNQLFEENPINASGVDAKAILSARLSKSRRLENLIAQLPGEKKNGLFGNLIALSLGLTPNFKSNFDLAEDAKLQLSKDTYDDDLDNLLAQIGDQYADLFLAAKNLSDAILLSDILRVNTEITKAPLSASMIKRYDEHHQDLTLLKALVRQQLPEKYKEIFFDQSKNGYAGYIDGGASQEEFYKFIKPILEKMDGTEELLVKLNREDLLRKQRTFDNGSIPHQIHLGELHAILRRQEDFYPFLKDNREKIEKILTFRIPYYVGPLARGNSRFAWMTRKSEETITPWNFEEVVDKGASAQSFIERMTNFDKNLPNEKVLPKHSLLYEYFTVYNELTKVKYVTEGMRKPAFLSGEQKKAIVDLLFKTNRKVTVKQLKEDYFKKIECFDSVEISGVEDRFNASLGTYHDLLKIIKDKDFLDNEENEDILEDIVLTLTLFEDREMIEERLKTYAHLFDDKVMKQLKRRRYTGWGRLSRKLINGIRDKQSGKTILDFLKSDGFANRNFMQLIHDDSLTFKEDIQKAQVSGQGDSLHEHIANLAGSPAIKKGILQTVKVVDELVKVMGRHKPENIVIEMARENQTTQKGQKNSRERMKRIEEGIKELGSQILKEHPVENTQLQNEKLYLYYLQNGRDMYVDQELDINRLSDYDVDHIVPQSFLKDDSIDNKVLTRSDKNRGKSDNVPSEEVVKKMKNYWRQLLNAKLITQRKFDNLTKAERGGLSELDKAGFIKRQLVETRQITKHVAQILDSRMNTKYDENDKLIREVKVITLKSKLVSDFRKDFQFYKVREINNYHHAHDAYLNAVVGTALIKKYPKLESEFVYGDYKVYDVRKMIAKSEQEIGKATAKYFFYSNIMNFFKTEITLANGEIRKRPLIETNGETGEIVWDKGRDFATVRKVLSMPQVNIVKKTEVQTGGFSKESILPKRNSDKLIARKKDWDPKKYGGFVSPTVAYSVLVVAKVEKGKSKKLKSVKELLGITIMERSSFEKNPIDFLEAKGYKEVKKDLIIKLPKYSLFELENGRKRMLASARELQKGNELALPSKYVNFLYLASHYEKLKGSPEDNEQKQLFVEQHKHYLDEIIEQISEFSKRVILADANLDKVLSAYNKHRDKPIREQAENIIHLFTLTNLGAPAAFKYFDTTIDRKQYRSTKEVLDATLIHQSITGLYETRIDLSQLGGDEGADKRTADGSEFESPKKKRKV

SEQ ID NO: 345 - protein, 1588 aa, synthetic construct
  REGION 1..1588: note = 05. monoABE8.1_bpNLS + V82S polypeptide sequence
MSEVEFSHEYWMRHALTLAKRARDEREVPVGAVLVLNNRVIGEGWNRAIGLHDPTAHAEIMALRQGGLVMQNYRLIDATLYSTFEPCVMCAGAMIHSRIGRVVFGVRNAKTGAAGSLMDVLHYPGMNHRVEITEGILADECAALLCYFFRMPRQVFNAQKKAQSSTDSGGSSGGSSGSETPGTSESATPESSGGSSGGSDKKYSIGLAIGTNSVGWAVITDEYKVPSKKFKVLGNTDRHSIKKNLIGALLFDSGETAEATRLKRTARRRYTRRKNRICYLQEIFSNEMAKVDDSFFHRLEESFLVEEDKKHERHPIFGNIVDEVAYHEKYPTIYHLRKKLVDSTDKADLRLIYLALAHMIKFRGHFLIEGDLNPDNSDVDKLFIQLVQTYNQLFEENPINASGVDAKAILSARLSKSRRLENLIAQLPGEKKNGLFGNLIALSLGLTPNFKSNFDLAEDAKLQLSKDTYDDDLDNLLAQIGDQYADLFLAAKNLSDAILLSDILRVNTEITKAPLSASMIKRYDEHHQDLTLLKALVRQQLPEKYKEIFFDQSKNGYAGYIDGGASQEEFYKFIKPILEKMDGTEELLVKLNREDLLRKQRTFDNGSIPHQIHLGELHAILRRQEDFYPFLKDNREKIEKILTFRIPYYVGPLARGNSRFAWMTRKSEETITPWNFEEVVDKGASAQSFIERMTNFDKNLPNEKVLPKHSLLYEYFTVYNELTKVKYVTEGMRKPAFLSGEQKKAIVDLLFKTNRKVTVKQLKEDYFKKIECFDSVEISGVEDRFNASLGTYHDLLKIIKDKDFLDNEENEDILEDIVLTLTLFEDREMIEERLKTYAHLFDDKVMKQLKRRRYTGWGRLSRKLINGIRDKQSGKTILDFLKSDGFANRNFMQLIHDDSLTFKEDIQKAQVSGQGDSLHEHIANLAGSPAIKKGILQTVKVVDELVKVMGRHKPENIVIEMARENQTTQKGQKNSRERMKRIEEGIKELGSQILKEHPVENTQLQNEKLYLYYLQNGRDMYVDQELDINRLSDYDVDHIVPQSFLKDDSIDNKVLTRSDKNRGKSDNVPSEEVVKKMKNYWRQLLNAKLITQRKFDNLTKAERGGLSELDKAGFIKRQLVETRQITKHVAQILDSRMNTKYDENDKLIREVKVITLKSKLVSDFRKDFQFYKVREINNYHHAHDAYLNAVVGTALIKKYPKLESEFVYGDYKVYDVRKMIAKSEQEIGKATAKYFFYSNIMNFFKTEITLANGEIRKRPLIETNGETGEIVWDKGRDFATVRKVLSMPQVNIVKKTEVQTGGFSKESILPKRNSDKLIARKKDWDPKKYGGFVSPTVAYSVLVVAKVEKGKSKKLKSVKELLGITIMERSSFEKNPIDFLEAKGYKEVKKDLIIKLPKYSLFELENGRKRMLASARELQKGNELALPSKYVNFLYLASHYEKLKGSPEDNEQKQLFVEQHKHYLDEIIEQISEFSKRVILADANLDKVLSAYNKHRDKPIREQAENIIHLFTLTNLGAPAAFKYFDTTIDRKQYRSTKEVLDATLIHQSITGLYETRIDLSQLGGDEGADKRTADGSEFESPKKKRKV

SEQ ID NO: 346 - protein, 1588 aa, synthetic construct
  REGION 1..1588: note = 06. monoABE8.1_bpNLS + T166R polypeptide sequence
MSEVEFSHEYWMRHALTLAKRARDEREVPVGAVLVLNNRVIGEGWNRAIGLHDPTAHAEIMALRQGGLVMQNYRLIDATLYVTFEPCVMCAGAMIHSRIGRVVFGVRNAKTGAAGSLMDVLHYPGMNHRVEITEGILADECAALLCYFFRMPRQVFNAQKKAQSSRDSGGSSGGSSGSETPGTSESATPESSGGSSGGSDKKYSIGLAIGTNSVGWAVITDEYKVPSKKFKVLGNTDRHSIKKNLIGALLFDSGETAEATRLKRTARRRYTRRKNRICYLQEIFSNEMAKVDDSFFHRLEESFLVEEDKKHERHPIFGNIVDEVAYHEKYPTIYHLRKKLVDSTDKADLRLIYLALAHMIKFRGHFLIEGDLNPDNSDVDKLFIQLVQTYNQLFEENPINASGVDAKAILSARLSKSRRLENLIAQLPGEKKNGLFGNLIALSLGLTPNFKSNFDLAEDAKLQLSKDTYDDDLDNLLAQIGDQYADLFLAAKNLSDAILLSDILRVNTEITKAPLSASMIKRYDEHHQDLTLLKALVRQQLPEKYKEIFFDQSKNGYAGYIDGGASQEEFYKFIKPILEKMDGTEELLVKLNREDLLRKQRTFDNGSIPHQIHLGELHAILRRQEDFYPFLKDNREKIEKILTFRIPYYVGPLARGNSRFAWMTRKSEETITPWNFEEVVDKGASAQSFIERMTNFDKNLPNEKVLPKHSLLYEYFTVYNELTKVKYVTEGMRKPAFLSGEQKKAIVDLLFKTNRKVTVKQLKEDYFKKIECFDSVEISGVEDRFNASLGTYHDLLKIIKDKDFLDNEENEDILEDIVLTLTLFEDREMIEERLKTYAHLFDDKVMKQLKRRRYTGWGRLSRKLINGIRDKQSGKTILDFLKSDGFANRNFMQLIHDDSLTFKEDIQKAQVSGQGDSLHEHIANLAGSPAIKKGILQTVKVVDELVKVMGRHKPENIVIEMARENQTTQKGQKNSRERMKRIEEGIKELGSQILKEHPVENTQLQNEKLYLYYLQNGRDMYVDQELDINRLSDYDVDHIVPQSFLKDDSIDNKVLTRSDKNRGKSDNVPSEEVVKKMKNYWRQLLNAKLITQRKFDNLTKAERGGLSELDKAGFIKRQLVETRQITKHVAQILDSRMNTKYDENDKLIREVKVITLKSKLVSDFRKDFQFYKVREINNYHHAHDAYLNAVVGTALIKKYPKLESEFVYGDYKVYDVRKMIAKSEQEIGKATAKYFFYSNIMNFFKTEITLANGEIRKRPLIETNGETGEIVWDKGRDFATVRKVLSMPQVNIVKKTEVQTGGFSKESILPKRNSDKLIARKKDWDPKKYGGFVSPTVAYSVLVVAKVEKGKSKKLKSVKELLGITIMERSSFEKNPIDFLEAKGYKEVKKDLIIKLPKYSLFELENGRKRMLASARELQKGNELALPSKYVNFLYLASHYEKLKGSPEDNEQKQLFVEQHKHYLDEIIEQISEFSKRVILADANLDKVLSAYNKHRDKPIREQAENIIHLFTLTNLGAPAAFKYFDTTIDRKQYRSTKEVLDATLIHQSITGLYETRIDLSQLGGDEGADKRTADGSEFESPKKKRKV

SEQ ID NO: 347 - protein, 1588 aa, synthetic construct
  REGION 1..1588: note = 07. monoABE8.1_bpNLS + Q154R polypeptide sequence
MSEVEFSHEYWMRHALTLAKRARDEREVPVGAVLVLNNRVIGEGWNRAIGLHDPTAHAEIMALRQGGLVMQNYRLIDATLYVTFEPCVMCAGAMIHSRIGRVVFGVRNAKTGAAGSLMDVLHYPGMNHRVEITEGILADECAALLCYFFRMPRRVFNAQKKAQSSTDSGGSSGGSSGSETPGTSESATPESSGGSSGGSDKKYSIGLAIGTNSVGWAVITDEYKVPSKKFKVLGNTDRHSIKKNLIGALLFDSGETAEATRLKRTARRRYTRRKNRICYLQEIFSNEMAKVDDSFFHRLEESFLVEEDKKHERHPIFGNIVDEVAYHEKYPTIYHLRKKLVDSTDKADLRLIYLALAHMIKFRGHFLIEGDLNPDNSDVDKLFIQLVQTYNQLFEENPINASGVDAKAILSARLSKSRRLENLIAQLPGEKKNGLFGNLIALSLGLTPNFKSNFDLAEDAKLQLSKDTYDDDLDNLLAQIGDQYADLFLAAKNLSDAILLSDILRVNTEITKAPLSASMIKRYDEHHQDLTLLKALVRQQLPEKYKEIFFDQSKNGYAGYIDGGASQEEFYKFIKPILEKMDGTEELLVKLNREDLLRKQRTFDNGSIPHQIHLGELHAILRRQEDFYPFLKDNREKIEKILTFRIPYYVGPLARGNSRFAWMTRKSEETITPWNFEEVVDKGASAQSFIERMTNFDKNLPNEKVLPKHSLLYEYFTVYNELTKVKYVTEGMRKPAFLSGEQKKAIVDLLFKTNRKVTVKQLKEDYFKKIECFDSVEISGVEDRFNASLGTYHDLLKIIKDKDFLDNEENEDILEDIVLTLTLFEDREMIEERLKTYAHLFDDKVMKQLKRRRYTGWGRLSRKLINGIRDKQSGKTILDFLKSDGFANRNFMQLIHDDSLTFKEDIQKAQVSGQGDSLHEHIANLAGSPAIKKGILQTVKVVDELVKVMGRHKPENIVIEMARENQTTQKGQKNSRERMKRIEEGIKELGSQILKEHPVENTQLQNEKLYLYYLQNGRDMYVDQELDINRLSDYDVDHIVPQSFLKDDSIDNKVLTRSDKNRGKSDNVPSEEVVKKMKNYWRQLLNAKLITQRKFDNLTKAERGGLSELDKAGFIKRQLVETRQITKHVAQILDSRMNTKYDENDKLIREVKVITLKSKLVSDFRKDFQFYKVREINNYHHAHDAYLNAVVGTALIKKYPKLESEFVYGDYKVYDVRKMIAKSEQEIGKATAKYFFYSNIMNFFKTEITLANGEIRKRPLIETNGETGEIVWDKGRDFATVRKVLSMPQVNIVKKTEVQTGGFSKESILPKRNSDKLIARKKDWDPKKYGGFVSPTVAYSVLVVAKVEKGKSKKLKSVKELLGITIMERSSFEKNPIDFLEAKGYKEVKKDLIIKLPKYSLFELENGRKRMLASARELQKGNELALPSKYVNFLYLASHYEKLKGSPEDNEQKQLFVEQHKHYLDEIIEQISEFSKRVILADANLDKVLSAYNKHRDKPIREQAENIIHLFTLTNLGAPAAFKYFDTTIDRKQYRSTKEVLDATLIHQSITGLYETRIDLSQLGGDEGADKRTADGSEFESPKKKRKV

SEQ ID NO: 348 - protein, 1588 aa, synthetic construct
  REGION 1..1588: note = 08. monoABE8.1_bpNLS +Y147R_Q154R_Y123H polypeptide sequence
MSEVEFSHEYWMRHALTLAKRARDEREVPVGAVLVLNNRVIGEGWNRAIGLHDPTAHAEIMALRQGGLVMQNYRLIDATLYVTFEPCVMCAGAMIHSRIGRVVFGVRNAKTGAAGSLMDVLHHPGMNHRVEITEGILADECAALLCRFFRMPRRVFNAQKKAQSSTDSGGSSGGSSGSETPGTSESATPESSGGSSGGSDKKYSIGLAIGTNSVGWAVITDEYKVPSKKFKVLGNTDRHSIKKNLIGALLFDSGETAEATRLKRTARRRYTRRKNRICYLQEIFSNEMAKVDDSFFHRLEESFLVEEDKKHERHPIFGNIVDEVAYHEKYPTIYHLRKKLVDSTDKADLRLIYLALAHMIKFRGHFLIEGDLNPDNSDVDKLFIQLVQTYNQLFEENPINASGVDAKAILSARLSKSRRLENLIAQLPGEKKNGLFGNLIALSLGLTPNFKSNFDLAEDAKLQLSKDTYDDDLDNLLAQIGDQYADLFLAAKNLSDAILLSDILRVNTEITKAPLSASMIKRYDEHHQDLTLLKALVRQQLPEKYKEIFFDQSKNGYAGYIDGGASQEEFYKFIKPILEKMDGTEELLVKLNREDLLRKQRTFDNGSIPHQIHLGELHAILRRQEDFYPFLKDNREKIEKILTFRIPYYVGPLARGNSRFAWMTRKSEETITPWNFEEVVDKGASAQSFIERMTNFDKNLPNEKVLPKHSLLYEYFTVYNELTKVKYVTEGMRKPAFLSGEQKKAIVDLLFKTNRKVTVKQLKEDYFKKIECFDSVEISGVEDRFNASLGTYHDLLKIIKDKDFLDNEENEDILEDIVLTLTLFEDREMIEERLKTYAHLFDDKVMKQLKRRRYTGWGRLSRKLINGIRDKQSGKTILDFLKSDGFANRNFMQLIHDDSLTFKEDIQKAQVSGQGDSLHEHIANLAGSPAIKKGILQTVKVVDELVKVMGRHKPENIVIEMARENQTTQKGQKNSRERMKRIEEGIKELGSQILKEHPVENTQLQNEKLYLYYLQNGRDMYVDQELDINRLSDYDVDHIVPQSFLKDDSIDNKVLTRSDKNRGKSDNVPSEEVVKKMKNYWRQLLNAKLITQRKFDNLTKAERGGLSELDKAGFIKRQLVETRQITKHVAQILDSRMNTKYDENDKLIREVKVITLKSKLVSDFRKDFQFYKVREINNYHHAHDAYLNAVVGTALIKKYPKLESEFVYGDYKVYDVRKMIAKSEQEIGKATAKYFFYSNIMNFFKTEITLANGEIRKRPLIETNGETGEIVWDKGRDFATVRKVLSMPQVNIVKKTEVQTGGFSKESILPKRNSDKLIARKKDWDPKKYGGFVSPTVAYSVLVVAKVEKGKSKKLKSVKELLGITIMERSSFEKNPIDFLEAKGYKEVKKDLIIKLPKYSLFELENGRKRMLASARELQKGNELALPSKYVNFLYLASHYEKLKGSPEDNEQKQLFVEQHKHYLDEIIEQISEFSKRVILADANLDKVLSAYNKHRDKPIREQAENIIHLFTLTNLGAPAAFKYFDTTIDRKQYRSTKEVLDATLIHQSITGLYETRIDLSQLGGDEGADKRTADGSEFESPKKKRKV

SEQ ID NO: 349 - protein, 1588 aa, synthetic construct
  REGION 1..1588: note = 09. monoABE8.1_bpNLS +Y147R_Q154R_I76Y polypeptide sequence
MSEVEFSHEYWMRHALTLAKRARDEREVPVGAVLVLNNRVIGEGWNRAIGLHDPTAHAEIMALRQGGLVMQNYRLYDATLYVTFEPCVMCAGAMIHSRIGRVVFGVRNAKTGAAGSLMDVLHYPGMNHRVEITEGILADECAALLCRFFRMPRRVFNAQKKAQSSTDSGGSSGGSSGSETPGTSESATPESSGGSSGGSDKKYSIGLAIGTNSVGWAVITDEYKVPSKKFKVLGNTDRHSIKKNLIGALLFDSGETAEATRLKRTARRRYTRRKNRICYLQEIFSNEMAKVDDSFFHRLEESFLVEEDKKHERHPIFGNIVDEVAYHEKYPTIYHLRKKLVDSTDKADLRLIYLALAHMIKFRGHFLIEGDLNPDNSDVDKLFIQLVQTYNQLFEENPINASGVDAKAILSARLSKSRRLENLIAQLPGEKKNGLFGNLIALSLGLTPNFKSNFDLAEDAKLQLSKDTYDDDLDNLLAQIGDQYADLFLAAKNLSDAILLSDILRVNTEITKAPLSASMIKRYDEHHQDLTLLKALVRQQLPEKYKEIFFDQSKNGYAGYIDGGASQEEFYKFIKPILEKMDGTEELLVKLNREDLLRKQRTFDNGSIPHQIHLGELHAILRRQEDFYPFLKDNREKIEKILTFRIPYYVGPLARGNSRFAWMTRKSEETITPWNFEEVVDKGASAQSFIERMTNFDKNLPNEKVLPKHSLLYEYFTVYNELTKVKYVTEGMRKPAFLSGEQKKAIVDLLFKTNRKVTVKQLKEDYFKKIECFDSVEISGVEDRFNASLGTYHDLLKIIKDKDFLDNEENEDILEDIVLTLTLFEDREMIEERLKTYAHLFDDKVMKQLKRRRYTGWGRLSRKLINGIRDKQSGKTILDFLKSDGFANRNFMQLIHDDSLTFKEDIQKAQVSGQGDSLHEHIANLAGSPAIKKGILQTVKVVDELVKVMGRHKPENIVIEMARENQTTQKGQKNSRERMKRIEEGIKELGSQILKEHPVENTQLQNEKLYLYYLQNGRDMYVDQELDINRLSDYDVDHIVPQSFLKDDSIDNKVLTRSDKNRGKSDNVPSEEVVKKMKNYWRQLLNAKLITQRKFDNLTKAERGGLSELDKAGFIKRQLVETRQITKHVAQILDSRMNTKYDENDKLIREVKVITLKSKLVSDFRKDFQFYKVREINNYHHAHDAYLNAVVGTALIKKYPKLESEFVYGDYKVYDVRKMIAKSEQEIGKATAKYFFYSNIMNFFKTEITLANGEIRKRPLIETNGETGEIVWDKGRDFATVRKVLSMPQVNIVKKTEVQTGGFSKESILPKRNSDKLIARKKDWDPKKYGGFVSPTVAYSVLVVAKVEKGKSKKLKSVKELLGITIMERSSFEKNPIDFLEAKGYKEVKKDLIIKLPKYSLFELENGRKRMLASARELQKGNELALPSKYVNFLYLASHYEKLKGSPEDNEQKQLFVEQHKHYLDEIIEQISEFSKRVILADANLDKVLSAYNKHRDKPIREQAENIIHLFTLTNLGAPAAFKYFDTTIDRKQYRSTKEVLDATLIHQSITGLYETRIDLSQLGGDEGADKRTADGSEFESPKKKRKV

SEQ ID NO: 350 - protein, 1588 aa, synthetic construct
  REGION 1..1588: note = 10. monoABE8.1_bpNLS +Y147R_Q154R_T166R polypeptide sequence
MSEVEFSHEYWMRHALTLAKRARDEREVPVGAVLVLNNRVIGEGWNRAIGLHDPTAHAEIMALRQGGLVMQNYRLIDATLYVTFEPCVMCAGAMIHSRIGRVVFGVRNAKTGAAGSLMDVLHYPGMNHRVEITEGILADECAALLCRFFRMPRRVFNAQKKAQSSRDSGGSSGGSSGSETPGTSESATPESSGGSSGGSDKKYSIGLAIGTNSVGWAVITDEYKVPSKKFKVLGNTDRHSIKKNLIGALLFDSGETAEATRLKRTARRRYTRRKNRICYLQEIFSNEMAKVDDSFFHRLEESFLVEEDKKHERHPIFGNIVDEVAYHEKYPTIYHLRKKLVDSTDKADLRLIYLALAHMIKFRGHFLIEGDLNPDNSDVDKLFIQLVQTYNQLFEENPINASGVDAKAILSARLSKSRRLENLIAQLPGEKKNGLFGNLIALSLGLTPNFKSNFDLAEDAKLQLSKDTYDDDLDNLLAQIGDQYADLFLAAKNLSDAILLSDILRVNTEITKAPLSASMIKRYDEHHQDLTLLKALVRQQLPEKYKEIFFDQSKNGYAGYIDGGASQEEFYKFIKPILEKMDGTEELLVKLNREDLLRKQRTFDNGSIPHQIHLGELHAILRRQEDFYPFLKDNREKIEKILTFRIPYYVGPLARGNSRFAWMTRKSEETITPWNFEEVVDKGASAQSFIERMTNFDKNLPNEKVLPKHSLLYEYFTVYNELTKVKYVTEGMRKPAFLSGEQKKAIVDLLFKTNRKVTVKQLKEDYFKKIECFDSVEISGVEDRFNASLGTYHDLLKIIKDKDFLDNEENEDILEDIVLTLTLFEDREMIEERLKTYAHLFDDKVMKQLKRRRYTGWGRLSRKLINGIRDKQSGKTILDFLKSDGFANRNFMQLIHDDSLTFKEDIQKAQVSGQGDSLHEHIANLAGSPAIKKGILQTVKVVDELVKVMGRHKPENIVIEMARENQTTQKGQKNSRERMKRIEEGIKELGSQILKEHPVENTQLQNEKLYLYYLQNGRDMYVDQELDINRLSDYDVDHIVPQSFLKDDSIDNKVLTRSDKNRGKSDNVPSEEVVKKMKNYWRQLLNAKLITQRKFDNLTKAERGGLSELDKAGFIKRQLVETRQITKHVAQILDSRMNTKYDENDKLIREVKVITLKSKLVSDFRKDFQFYKVREINNYHHAHDAYLNAVVGTALIKKYPKLESEFVYGDYKVYDVRKMIAKSEQEIGKATAKYFFYSNIMNFFKTEITLANGEIRKRPLIETNGETGEIVWDKGRDFATVRKVLSMPQVNIVKKTEVQTGGFSKESILPKRNSDKLIARKKDWDPKKYGGFVSPTVAYSVLVVAKVEKGKSKKLKSVKELLGITIMERSSFEKNPIDFLEAKGYKEVKKDLIIKLPKYSLFELENGRKRMLASARELQKGNELALPSKYVNFLYLASHYEKLKGSPEDNEQKQLFVEQHKHYLDEIIEQISEFSKRVILADANLDKVLSAYNKHRDKPIREQAENIIHLFTLTNLGAPAAFKYFDTTIDRKQYRSTKEVLDATLIHQSITGLYETRIDLSQLGGDEGADKRTADGSEFESPKKKRKV

SEQ ID NO: 351 - protein, 1588 aa, synthetic construct
  REGION 1..1588: note = 11. monoABE8.1_bpNLS +Y147T_Q154R polypeptide sequence
MSEVEFSHEYWMRHALTLAKRARDEREVPVGAVLVLNNRVIGEGWNRAIGLHDPTAHAEIMALRQGGLVMQNYRLIDATLYVTFEPCVMCAGAMIHSRIGRVVFGVRNAKTGAAGSLMDVLHYPGMNHRVEITEGILADECAALLCTFFRMPRRVFNAQKKAQSSTDSGGSSGGSSGSETPGTSESATPESSGGSSGGSDKKYSIGLAIGTNSVGWAVITDEYKVPSKKFKVLGNTDRHSIKKNLIGALLFDSGETAEATRLKRTARRRYTRRKNRICYLQEIFSNEMAKVDDSFFHRLEESFLVEEDKKHERHPIFGNIVDEVAYHEKYPTIYHLRKKLVDSTDKADLRLIYLALAHMIKFRGHFLIEGDLNPDNSDVDKLFIQLVQTYNQLFEENPINASGVDAKAILSARLSKSRRLENLIAQLPGEKKNGLFGNLIALSLGLTPNFKSNFDLAEDAKLQLSKDTYDDDLDNLLAQIGDQYADLFLAAKNLSDAILLSDILRVNTEITKAPLSASMIKRYDEHHQDLTLLKALVRQQLPEKYKEIFFDQSKNGYAGYIDGGASQEEFYKFIKPILEKMDGTEELLVKLNREDLLRKQRTFDNGSIPHQIHLGELHAILRRQEDFYPFLKDNREKIEKILTFRIPYYVGPLARGNSRFAWMTRKSEETITPWNFEEVVDKGASAQSFIERMTNFDKNLPNEKVLPKHSLLYEYFTVYNELTKVKYVTEGMRKPAFLSGEQKKAIVDLLFKTNRKVTVKQLKEDYFKKIECFDSVEISGVEDRFNASLGTYHDLLKIIKDKDFLDNEENEDILEDIVLTLTLFEDREMIEERLKTYAHLFDDKVMKQLKRRRYTGWGRLSRKLINGIRDKQSGKTILDFLKSDGFANRNFMQLIHDDSLTFKEDIQKAQVSGQGDSLHEHIANLAGSPAIKKGILQTVKVVDELVKVMGRHKPENIVIEMARENQTTQKGQKNSRERMKRIEEGIKELGSQILKEHPVENTQLQNEKLYLYYLQNGRDMYVDQELDINRLSDYDVDHIVPQSFLKDDSIDNKVLTRSDKNRGKSDNVPSEEVVKKMKNYWRQLLNAKLITQRKFDNLTKAERGGLSELDKAGFIKRQLVETRQITKHVAQILDSRMNTKYDENDKLIREVKVITLKSKLVSDFRKDFQFYKVREINNYHHAHDAYLNAVVGTALIKKYPKLESEFVYGDYKVYDVRKMIAKSEQEIGKATAKYFFYSNIMNFFKTEITLANGEIRKRPLIETNGETGEIVWDKGRDFATVRKVLSMPQVNIVKKTEVQTGGFSKESILPKRNSDKLIARKKDWDPKKYGGFVSPTVAYSVLVVAKVEKGKSKKLKSVKELLGITIMERSSFEKNPIDFLEAKGYKEVKKDLIIKLPKYSLFELENGRKRMLASARELQKGNELALPSKYVNFLYLASHYEKLKGSPEDNEQKQLFVEQHKHYLDEIIEQISEFSKRVILADANLDKVLSAYNKHRDKPIREQAENIIHLFTLTNLGAPAAFKYFDTTIDRKQYRSTKEVLDATLIHQSITGLYETRIDLSQLGGDEGADKRTADGSEFESPKKKRKV

SEQ ID NO: 352 - protein, 1588 aa, synthetic construct
  REGION 1..1588: note = 12. monoABE8.1_bpNLS +Y147T_Q154S polypeptide sequence
MSEVEFSHEYWMRHALTLAKRARDEREVPVGAVLVLNNRVIGEGWNRAIGLHDPTAHAEIMALRQGGLVMQNYRLIDATLYVTFEPCVMCAGAMIHSRIGRVVFGVRNAKTGAAGSLMDVLHYPGMNHRVEITEGILADECAALLCTFFRMPRSVFNAQKKAQSSTDSGGSSGGSSGSETPGTSESATPESSGGSSGGSDKKYSIGLAIGTNSVGWAVITDEYKVPSKKFKVLGNTDRHSIKKNLIGALLFDSGETAEATRLKRTARRRYTRRKNRICYLQEIFSNEMAKVDDSFFHRLEESFLVEEDKKHERHPIFGNIVDEVAYHEKYPTIYHLRKKLVDSTDKADLRLIYLALAHMIKFRGHFLIEGDLNPDNSDVDKLFIQLVQTYNQLFEENPINASGVDAKAILSARLSKSRRLENLIAQLPGEKKNGLFGNLIALSLGLTPNFKSNFDLAEDAKLQLSKDTYDDDLDNLLAQIGDQYADLFLAAKNLSDAILLSDILRVNTEITKAPLSASMIKRYDEHHQDLTLLKALVRQQLPEKYKEIFFDQSKNGYAGYIDGGASQEEFYKFIKPILEKMDGTEELLVKLNREDLLRKQRTFDNGSIPHQIHLGELHAILRRQEDFYPFLKDNREKIEKILTFRIPYYVGPLARGNSRFAWMTRKSEETITPWNFEEVVDKGASAQSFIERMTNFDKNLPNEKVLPKHSLLYEYFTVYNELTKVKYVTEGMRKPAFLSGEQKKAIVDLLFKTNRKVTVKQLKEDYFKKIECFDSVEISGVEDRFNASLGTYHDLLKIIKDKDFLDNEENEDILEDIVLTLTLFEDREMIEERLKTYAHLFDDKVMKQLKRRRYTGWGRLSRKLINGIRDKQSGKTILDFLKSDGFANRNFMQLIHDDSLTFKEDIQKAQVSGQGDSLHEHIANLAGSPAIKKGILQTVKVVDELVKVMGRHKPENIVIEMARENQTTQKGQKNSRERMKRIEEGIKELGSQILKEHPVENTQLQNEKLYLYYLQNGRDMYVDQELDINRLSDYDVDHIVPQSFLKDDSIDNKVLTRSDKNRGKSDNVPSEEVVKKMKNYWRQLLNAKLITQRKFDNLTKAERGGLSELDKAGFIKRQLVETRQITKHVAQILDSRMNTKYDENDKLIREVKVITLKSKLVSDFRKDFQFYKVREINNYHHAHDAYLNAVVGTALIKKYPKLESEFVYGDYKVYDVRKMIAKSEQEIGKATAKYFFYSNIMNFFKTEITLANGEIRKRPLIETNGETGEIVWDKGRDFATVRKVLSMPQVNIVKKTEVQTGGFSKESILPKRNSDKLIARKKDWDPKKYGGFVSPTVAYSVLVVAKVEKGKSKKLKSVKELLGITIMERSSFEKNPIDFLEAKGYKEVKKDLIIKLPKYSLFELENGRKRMLASARELQKGNELALPSKYVNFLYLASHYEKLKGSPEDNEQKQLFVEQHKHYLDEIIEQISEFSKRVILADANLDKVLSAYNKHRDKPIREQAENIIHLFTLTNLGAPAAFKYFDTTIDRKQYRSTKEVLDATLIHQSITGLYETRIDLSQLGGDEGADKRTADGSEFESPKKKRKV

SEQ ID NO: 353 - protein, 1588 aa, synthetic construct
  REGION 1..1588: note = 13. monoABE8.1_bpNLS +H123Y123H_Y147R_Q154R_I76Y polypeptide sequence
MSEVEFSHEYWMRHALTLAKRARDEREVPVGAVLVLNNRVIGEGWNRAIGLHDPTAHAEIMALRQGGLVMQNYRLYDATLYVTFEPCVMCAGAMIHSRIGRVVFGVRNAKTGAAGSLMDVLHHPGMNHRVEITEGILADECAALLCRFFRMPRRVFNAQKKAQSSTDSGGSSGGSSGSETPGTSESATPESSGGSSGGSDKKYSIGLAIGTNSVGWAVITDEYKVPSKKFKVLGNTDRHSIKKNLIGALLFDSGETAEATRLKRTARRRYTRRKNRICYLQEIFSNEMAKVDDSFFHRLEESFLVEEDKKHERHPIFGNIVDEVAYHEKYPTIYHLRKKLVDSTDKADLRLIYLALAHMIKFRGHFLIEGDLNPDNSDVDKLFIQLVQTYNQLFEENPINASGVDAKAILSARLSKSRRLENLIAQLPGEKKNGLFGNLIALSLGLTPNFKSNFDLAEDAKLQLSKDTYDDDLDNLLAQIGDQYADLFLAAKNLSDAILLSDILRVNTEITKAPLSASMIKRYDEHHQDLTLLKALVRQQLPEKYKEIFFDQSKNGYAGYIDGGASQEEFYKFIKPILEKMDGTEELLVKLNREDLLRKQRTFDNGSIPHQIHLGELHAILRRQEDFYPFLKDNREKIEKILTFRIPYYVGPLARGNSRFAWMTRKSEETITPWNFEEVVDKGASAQSFIERMTNFDKNLPNEKVLPKHSLLYEYFTVYNELTKVKYVTEGMRKPAFLSGEQKKAIVDLLFKTNRKVTVKQLKEDYFKKIECFDSVEISGVEDRFNASLGTYHDLLKIIKDKDFLDNEENEDILEDIVLTLTLFEDREMIEERLKTYAHLFDDKVMKQLKRRRYTGWGRLSRKLINGIRDKQSGKTILDFLKSDGFANRNFMQLIHDDSLTFKEDIQKAQVSGQGDSLHEHIANLAGSPAIKKGILQTVKVVDELVKVMGRHKPENIVIEMARENQTTQKGQKNSRERMKRIEEGIKELGSQILKEHPVENTQLQNEKLYLYYLQNGRDMYVDQELDINRLSDYDVDHIVPQSFLKDDSIDNKVLTRSDKNRGKSDNVPSEEVVKKMKNYWRQLLNAKLITQRKFDNLTKAERGGLSELDKAGFIKRQLVETRQITKHVAQILDSRMNTKYDENDKLIREVKVITLKSKLVSDFRKDFQFYKVREINNYHHAHDAYLNAVVGTALIKKYPKLESEFVYGDYKVYDVRKMIAKSEQEIGKATAKYFFYSNIMNFFKTEITLANGEIRKRPLIETNGETGEIVWDKGRDFATVRKVLSMPQVNIVKKTEVQTGGFSKESILPKRNSDKLIARKKDWDPKKYGGFVSPTVAYSVLVVAKVEKGKSKKLKSVKELLGITIMERSSFEKNPIDFLEAKGYKEVKKDLIIKLPKYSLFELENGRKRMLASARELQKGNELALPSKYVNFLYLASHYEKLKGSPEDNEQKQLFVEQHKHYLDEIIEQISEFSKRVILADANLDKVLSAYNKHRDKPIREQAENIIHLFTLTNLGAPAAFKYFDTTIDRKQYRSTKEVLDATLIHQSITGLYETRIDLSQLGGDEGADKRTADGSEFESPKKKRKV

SEQ ID NO: 354 - protein, 1588 aa, synthetic construct
  REGION 1..1588: note = 14. monoABE8.1_bpNLS + V82S +Q154R polypeptide sequence
MSEVEFSHEYWMRHALTLAKRARDEREVPVGAVLVLNNRVIGEGWNRAIGLHDPTAHAEIMALRQGGLVMQNYRLIDATLYSTFEPCVMCAGAMIHSRIGRVVFGVRNAKTGAAGSLMDVLHYPGMNHRVEITEGILADECAALLCYFFRMPRRVFNAQKKAQSSTDSGGSSGGSSGSETPGTSESATPESSGGSSGGSDKKYSIGLAIGTNSVGWAVITDEYKVPSKKFKVLGNTDRHSIKKNLIGALLFDSGETAEATRLKRTARRRYTRRKNRICYLQEIFSNEMAKVDDSFFHRLEESFLVEEDKKHERHPIFGNIVDEVAYHEKYPTIYHLRKKLVDSTDKADLRLIYLALAHMIKFRGHFLIEGDLNPDNSDVDKLFIQLVQTYNQLFEENPINASGVDAKAILSARLSKSRRLENLIAQLPGEKKNGLFGNLIALSLGLTPNFKSNFDLAEDAKLQLSKDTYDDDLDNLLAQIGDQYADLFLAAKNLSDAILLSDILRVNTEITKAPLSASMIKRYDEHHQDLTLLKALVRQQLPEKYKEIFFDQSKNGYAGYIDGGASQEEFYKFIKPILEKMDGTEELLVKLNREDLLRKQRTFDNGSIPHQIHLGELHAILRRQEDFYPFLKDNREKIEKILTFRIPYYVGPLARGNSRFAWMTRKSEETITPWNFEEVVDKGASAQSFIERMTNFDKNLPNEKVLPKHSLLYEYFTVYNELTKVKYVTEGMRKPAFLSGEQKKAIVDLLFKTNRKVTVKQLKEDYFKKIECFDSVEISGVEDRFNASLGTYHDLLKIIKDKDFLDNEENEDILEDIVLTLTLFEDREMIEERLKTYAHLFDDKVMKQLKRRRYTGWGRLSRKLINGIRDKQSGKTILDFLKSDGFANRNFMQLIHDDSLTFKEDIQKAQVSGQGDSLHEHIANLAGSPAIKKGILQTVKVVDELVKVMGRHKPENIVIEMARENQTTQKGQKNSRERMKRIEEGIKELGSQILKEHPVENTQLQNEKLYLYYLQNGRDMYVDQELDINRLSDYDVDHIVPQSFLKDDSIDNKVLTRSDKNRGKSDNVPSEEVVKKMKNYWRQLLNAKLITQRKFDNLTKAERGGLSELDKAGFIKRQLVETRQITKHVAQILDSRMNTKYDENDKLIREVKVITLKSKLVSDFRKDFQFYKVREINNYHHAHDAYLNAVVGTALIKKYPKLESEFVYGDYKVYDVRKMIAKSEQEIGKATAKYFFYSNIMNFFKTEITLANGEIRKRPLIETNGETGEIVWDKGRDFATVRKVLSMPQVNIVKKTEVQTGGFSKESILPKRNSDKLIARKKDWDPKKYGGFVSPTVAYSVLVVAKVEKGKSKKLKSVKELLGITIMERSSFEKNPIDFLEAKGYKEVKKDLIIKLPKYSLFELENGRKRMLASARELQKGNELALPSKYVNFLYLASHYEKLKGSPEDNEQKQLFVEQHKHYLDEIIEQISEFSKRVILADANLDKVLSAYNKHRDKPIREQAENIIHLFTLTNLGAPAAFKYFDTTIDRKQYRSTKEVLDATLIHQSITGLYETRIDLSQLGGDEGADKRTADGSEFESPKKKRKV

SEQ ID NO: 355 - protein, 4 aa, synthetic construct
  REGION 1..4: note = synthetic peptide sequence
SGGS

SEQ ID NO: 356 - protein, 24 aa, synthetic construct
  REGION 1..24: note = synthetic peptide sequence
SGGSSGSETPGTSESATPESSGGS

SEQ ID NO: 357 - protein, 32 aa, synthetic construct
  REGION 1..32: note = synthetic polypeptide sequence
SGGSSGGSSGSETPGTSESATPESSGGSSGGS

SEQ ID NO: 358 - protein, 104 aa, synthetic construct
  REGION 1..104: note = synthetic polypeptide sequence
GGSGGSPGSPAGSPTSTEEGTSESATPESGPGTSTEPSEGSAPGSPAGSPTSTEEGTSTEPSEGSAPGTSTEPSEGSAPGTSESATPESGPGSEPATSGGSGGS

SEQ ID NO: 359 - protein, 24 aa, synthetic construct
  REGION 1..24: note = synthetic peptide sequence
SGGSSGGSSGSETPGTSESATPES

SEQ ID NO: 360 - protein, 40 aa, synthetic construct
  REGION 1..40: note = synthetic polypeptide sequence
SGGSSGGSSGSETPGTSESATPESSGGSSGGSSGGSSGGS

SEQ ID NO: 361 - protein, 64 aa, synthetic construct
  REGION 1..64: note = synthetic polypeptide sequence
SGGSSGGSSGSETPGTSESATPESSGGSSGGSSGGSSGGSSGSETPGTSESATPESSGGSSGGS

SEQ ID NO: 362 - protein, 92 aa, synthetic construct
  REGION 1..92: note = synthetic polypeptide sequence
PGSPAGSPTSTEEGTSESATPESGPGTSTEPSEGSAPGSPAGSPTSTEEGTSTEPSEGSAPGTSTEPSEGSAPGTSESATPESGPGSEPATS

SEQ ID NO: 363 - protein, 5 aa, synthetic construct
  REGION 1..5: note = synthetic peptide sequence
PAPAP

SEQ ID NO: 364 - protein, 6 aa, synthetic construct
  REGION 1..6: note = synthetic peptide sequence
PAPAPA

SEQ ID NO: 365 - protein, 7 aa, synthetic construct
  REGION 1..7: note = synthetic peptide sequence
PAPAPAP

SEQ ID NO: 366 - protein, 8 aa, synthetic construct
  REGION 1..8: note = synthetic peptide sequence
PAPAPAPA

SEQ ID NO: 367 - protein, 9 aa, synthetic construct
  REGION 1..9: note = synthetic peptide sequence
PAPAPAPAP

SEQ ID NO: 368 - protein, 15 aa, synthetic construct
  REGION 1..15: note = synthetic peptide sequence
PAPAPAPAPAPAPAP

SEQ ID NO: 369 - protein, 21 aa, synthetic construct
  REGION 1..21: note = synthetic peptide sequence
PAPAPAPAPAPAPAPAPAPAP

SEQ ID NO: 370 - DNA, 306 bp, synthetic construct
  misc_feature 1..306: note = DnaE Intein-N polynucleotide sequence
  source 1..306: mol_type = other DNA
tgcctgtcatacgaaaccgagatactgacagtagaatatggccttctgccaatcgggaagattgtggagaaacggatagaatgcacagtttactctgtcgataacaatggtaacatttatactcagccagttgcccagtggcacgaccggggagagcaggaagtattcgaatactgtctggaggatggaagtctcattagggccactaaggaccacaaatttatgacagtcgatggccagatgctgcctatagacgaaatctttgagcgagagttggacctcatgcgagttgacaaccttcctaat

SEQ ID NO: 371 - protein, 102 aa, synthetic construct
  REGION 1..102: note = DnaE Intein-N polypeptide sequence
CLSYETEILTVEYGLLPIGKIVEKRIECTVYSVDNNGNIYTQPVAQWHDRGEQEVFEYCLEDGSLIRATKDHKFMTVDGQMLPIDEIFERELDLMRVDNLPN

SEQ ID NO: 372 - DNA, 108 bp, synthetic construct
  misc_feature 1..108: note = DnaE Intein-C polynucleotide sequence
  source 1..108: mol_type = other DNA
atgatcaagatagctacaaggaagtatcttggcaaacaaaacgtttatgatattggagtcgaaagagatcacaactttgctctgaagaacggattcatagcttctaat

SEQ ID NO: 373 - protein, 36 aa, synthetic construct
  REGION 1..36: note = DnaE Intein-C polypeptide sequence
MIKIATRKYLGKQNVYDIGVERDHNFALKNGFIASN

SEQ ID NO: 374 - DNA, 303 bp, synthetic construct
  misc_feature 1..303: note = Cfa-N polynucleotide sequence
  source 1..303: mol_type = other DNA
tgcctgtcttatgataccgagatacttaccgttgaatatggcttcttgcctattggaaagattgtcgaagagagaattgaatgcacagtatatactgtagacaagaatggtttcgtttacacacagcccattgctcaatggcacaatcgcggcgaacaagaagtatttgagtactgtctcgaggatggaagcatcatacgagcaactaaagatcataaattcatgaccactgacgggcagatgttgccaatagatgagatattcgagcggggcttggatctcaaacaagtggatggattgcca

SEQ ID NO: 375 - protein, 101 aa, synthetic construct
  REGION 1..101: note = Cfa-N polypeptide sequence
CLSYDTEILTVEYGFLPIGKIVEERIECTVYTVDKNGFVYTQPIAQWHNRGEQEVFEYCLEDGSIIRATKDHKFMTTDGQMLPIDEIFERGLDLKQVDGLP

SEQ ID NO: 376 - DNA, 159 bp, synthetic construct
  misc_feature 1..159: note = Cfa-C polynucleotide sequence
  source 1..159: mol_type = other DNA
atgaagaggactgccgatggatcagagtttgaatctcccaagaagaagaggaaagtaaagataatatctcgaaaaagtcttggtacccaaaatgtctatgatattggagtggagaaagatcacaacttccttctcaagaacggtctcgtagccagcaac

SEQ ID NO: 377 - protein, 53 aa, synthetic construct
  REGION 1..53: note = Cfa-C polypeptide sequence
MKRTADGSEFESPKKKRKVKIISRKSLGTQNVYDIGVEKDHNFLLKNGLVASN

SEQ ID NO: 378 - protein, 1081 aa, Neisseria meningitidis
  REGION 1..1081: note = MISC_FEATURE - Nme3Cas9; WP_002217928.1 type II CRISPR RNA-guided endonuclease Cas9 [Neisseria meningitidis]
  REGION 1..1081: note = MISC_FEATURE - NCBI Reference: WP_002217928.1; type II CRISPR RNA-guided endonuclease Cas9; Nme3Cas9 polypeptide sequence
MAAFKPNPINYILGLDIGIASVGWAMVEIDEEENPIRLIDLGVRVFERAEVPKTGDSLAMARRLARSVRRLTRRRAHRLLRARRLLKREGVLQAADFDENGLIKSLPNTPWQLRAAALDRKLTPLEWSAVLLHLIKHRGYLSQRKNEGETADKELGALLKGVADNAHALQTGDFRTPAELALNKFEKECGHIRNQRGDYSHTFSRKDLQAELNLLFEKQKEFGNPHVSGGLKEGIETLLMTQRPALSGDAVQKMLGHCTFEPAEPKAAKNTYTAERFIWLTKLNNLRILEQGSERPLTDTERATLMDEPYRKSKLTYAQARKLLSLEDTAFFKGLRYGKDNAEASTLMEMKAYHTISRALEKEGLKDKKSPLNLSPELQDEIGTAFSLFKTDEDITGRLKDRIQPEILEALLKHISFDKFVQISLKALRRIVPLMEQGKRYDEACAEIYGDHYGKKNTEEKIYLPPIPADEIRNPVVLRALSQARKVINGVVRRYGSPARIHIETAREVGKSFKDRKEIEKRQEENRKDREKAAAKFREYFPNFVGEPKSKDILKLRLYEQQHGKCLYSGKEINLGRLNEKGYVEIDHALPFSRTWDDSFNNKVLVLGSENQNKGNQTPYEYFNGKDNSREWQEFKARVETSRFPRSKKQRILLQKFDEDGFKERNLNDTRYVNRFLCQFVADRMRLTGKGKKRVFASNGQITNLLRGFWGLRKVRAENDRHHALDAVVVACSTVAMQQKITRFVRYKEMNAFDGKTIDKETGEVLHQKTHFPQPWEFFAQEVMIRVFGKPDGKPEFEEADTPEKLRTLLAEKLSSRPEAVHEYVTPLFVSRAPNRKMSGQGHMETVKSAKRLDEGVSVLRVPLTQLKLKDLEKMVNREREPKLYEALKARLEAHKDDPAKAFAEPFYKYDKAGNRTQQVKAVRVEQVQKTGVWVRNHNGIADNATMVRVDVFEKGDKYYLVPIYSWQVAKGILPDRAVVAYADEEDWTVIDESFRFKFVLYSNDLIKVQLKKDSFLGYFSGLDRATGAISLREHDLEKSKGKDGMHRIGVKTALSFQKYQIDEMGKEIRPCRLKKRPPVR

SEQ ID NO: 379 - RNA, 66 nt, synthetic construct
  misc_feature 1..66: note = Telomerase Ku Binding Motif oligonucleotide sequence
  source 1..66: mol_type = other RNA
ttcttgtcgtacttatagatcgctacgttatttcaattttgaaaatctgagtcctgggagtgcgga

SEQ ID NO: 380 - protein, 1094 aa, synthetic construct
  REGION 1..1094: note = Telomerase Ku Heterodimer polypeptide sequence
MSGWESYYKTEGDEEAEEEQEENLEASGDYKYSGRDSLIFLVDASKAMFESQSEDELTPFDMSIQCIQSVYISKIISSDRDLLAVVFYGTEKDKNSVNFKNIYVLQELDNPGAKRILELDQFKGQQGQKRFQDMMGHGSDYSLSEVLWVCANLFSDVQFKMSHKRIMLFTNEDNPHGNDSAKASRARTKAGDLRDTGIFLDLMHLKKPGGFDISLFYRDIISIAEDEDLRVHFEESSKLEDLLRKVRAKETRKRALSRLKLKLNKDIVISVGIYNLVQKALKPPPIKLYRETNEPVKTKTRTFNTSTGGLLLPSDTKRSQIYGSRQIILEKEETEELKRFDDPGLMLMGFKPLVLLKKHHYLRPSLFVYPEESLVIGSSTLFSALLIKCLEKEVAALCRYTPRRNIPPYFVALVPQEEELDDQKIQVTPPGFQLVFLPFADDKRKMPFTEKIMATPEQVGKMKAIVEKLRFTYRSDSFENPVLQQHFRNLEALALDLMEPEQAVDLTLPKVEAMNKRLGSLVDEFKELVYPPDYNPEGKVTKRKHDNEGSGSKRPKVEYSEEELKTHISKGTLGKFTVPMLKEACRAYGLKSGLKKQELLEALTKHFQDMVRSGNKAAVVLCMDVGFTMSNSIPGIESPFEQAKKVITMFVQRQVFAENKDEIALVLFGTDGTDNPLSGGDQYQNITVHRHLMLPDFDLLEDIESKIQPGSQQADFLDALIVSMDVIQHETIGKKFEKRHIEIFTDLSSRFSKSQLDIIIHSLKKCDISERHSIHWPCRLTIGSNLSIRIAAYKSILQERVKKTWTVVDAKTLKKEDIQKETVYCLNDDDETEVLKEDIIQGFRYGSDIVPFSKVDEEQMKYKSEGKCFSVLGFCKSSQVQRRFFMGNQVLKVFAARDDEAAAVALSSLIHALDDLDMVAIVRYAYDKRANPQVGVAFPHIKHNYECLVYVQLPFMEDLRQYMFSSLKNSKKYAPTEAQLNAVDALIDSMSLAKKDEKTDTLEDLFPTTKIPNPRFQRLFQCLLHRALHPREPLPPIQQHIWNMLNPPAEVTTKSQIPLSKIKTLFPLIEAKKKDQVTAQEIFQDNHEDGPTAK

SEQ ID NO: 381 - RNA, 10 nt, synthetic construct
  misc_feature 1..10: note = Telomerase Sm7 consensus site(single stranded) oligonucleotide sequence
  source 1..10: mol_type = other RNA
aatttttgga

SEQ ID NO: 382 - protein, 83 aa, synthetic construct
  REGION 1..83: note = MS2 coat protein polypeptide sequence
GSVIDVSSQRVNVQRPLDALGNSLNSPVIIKLKGDREFRGVLKSFDLHMNLVLNDAEELEDGEVTRRLGTVLIRGDNIVYISP

SEQ ID NO: 383 - RNA, 26 nt, synthetic construct
  misc_feature 1..26: note = PP7 phage operator stem loop oligonucleotide sequence
  source 1..26: mol_type = other RNA
ataaggagtttatatggaaaccctta

SEQ ID NO: 384 - protein, 128 aa, synthetic construct
  REGION 1..128: note = PP7 coat protein (PCP)polypeptide sequence
MSKTIVLSVGEATRTLTEIQSTADRQIFEEKVGPLVGRLRLTASLRQNGAKTAYRVNLKLDQADVVDCSTSVCGELPKVRYTQVWSHDVTIVANSTEASRKSLYDLTKSLVATSQVEDLVVNLVPLGR

SEQ ID NO: 385 - RNA, 19 nt, synthetic construct
  misc_feature 1..19: note = SfMu Com stem loop oligonucleotide sequence
  source 1..19: mol_type = other RNA
ctgaatgcctgcgagcatc

SEQ ID NO: 386 - protein, 62 aa, synthetic construct
  REGION 1..62: note = SfMu Com binding protein polypeptide sequence
MKSIRCKNCNKLLFKADSFDHIEIRCPRCKRHIIMLNACEHPTEKHCGKREKITHSDETVRY

SEQ ID NO: 387 - protein, 47 aa, synthetic construct
  REGION 1..47: note = leucine zipper polypeptide sequence
LEIRAAFLRQRNTALRTEVAELEQEVQRLENEVSQYETRYGPLGGGK

SEQ ID NO: 388 - protein, 47 aa, synthetic construct
  REGION 1..47: note = leucine zipper polypeptide sequence
LEIEAAFLERENTALETRVAELRQRVQRLRNRVSQYRTRYGPLGGGK

SEQ ID NO: 389 - DNA, 303 bp, synthetic construct
  source 1..303: mol_type = other DNA
tgcctgagctacgataccgagatcctgaccgtggaatacggcttcctgcctatcggcaagatcgtcgaggaacggatcgagtgcacagtgtacaccgtggataagaatggcttcgtgtacacccagcctatcgctcagtggcacaacagaggcgagcaagaggtgttcgagtactgcctggaagatggcagcatcatccgggccaccaaggaccacaagtttatgaccaccgacggccagatgctgcccatcgacgagatctttgagagaggcctggacctgaaacaggtggacggactgcct

SEQ ID NO: 390 - protein, 101 aa, synthetic construct; identical to SEQ ID NO: 375

SEQ ID NO: 391 - DNA, 264 bp, synthetic construct
  source 1..264: mol_type = other DNA
tgtctggacctcaagacccaagtgcagacacctcagggcatgaaagagattagcaatatccaggtgggcgacctggtcctgagcaacaccggctacaacgaggtgctgaacgtgttccctaagtccaagaagaaatcttataagatcaccctggaagatggcaaggaaatcatctgcagcgaggaacacctgttccccacccagaccggcgagatgaacatcagcggcggactgaaggagggcatgtgcctgtacgtgaaggag

SEQ ID NO: 392 - protein, 88 aa, synthetic construct
CLDLKTQVQTPQGMKEISNIQVGDLVLSNTGYNEVLNVFPKSKKKSYKITLEDGKEIICSEEHLFPTQTGEMNISGGLKEGMCLYVKE

SEQ ID NO: 393 - DNA, 267 bp, synthetic construct
  source 1..267: mol_type = other DNA
tgcctgagcctggacaccatggtggtgacaaacggcaaggccatcgagatcagagatgtgaaggtgggagattggctggaaagcgaatgtggcccagtgcaggttacagaggtgctgcctatcatcaagcagcctgtctttgagattgtgctgaaaagcggaaaaaagatccgggtgtccgctaatcacaagttccccaccaaggacggcctcaagaccatcaacagcggcctgaaggtgggcgacttcctgagaagcagagccaag

SEQ ID NO: 394 - protein, 89 aa, synthetic construct
CLSLDTMVVTNGKAIEIRDVKVGDWLESECGPVQVTEVLPIIKQPVFEIVLKSGKKIRVSANHKFPTKDGLKTINSGLKVGDFLRSRAK

SEQ ID NO: 395 - DNA, 303 bp, synthetic construct
  source 1..303: mol_type = other DNA
tgttttgtgcctggcaccctggtgaacacagagaatggcctgaagaaaatcgaggaaatcaaggtgggcgacaaggtgttcagccatacaggcaagctgcaggaggtggtggacaccctgatcttcgaccgggacgaggaaatcatctctatcaacggcattgattgcaccaagaaccacgagttctacgtgatcgataaggaaaacgctaatagagtgaacgaggacaacatccacctcttcgccagatgggtccacgccgaggaactggatatgaaaaagcacctgctgatcgagctggaa

SEQ ID NO: 396 - protein, 101 aa, synthetic construct
CFVPGTLVNTENGLKKIEEIKVGDKVFSHTGKLQEVVDTLIFDRDEEIISINGIDCTKNHEFYVIDKENANRVNEDNIHLFARWVHAEELDMKKHLLIELE

SEQ ID NO: 397 - DNA, 315 bp, synthetic construct
  source 1..315: mol_type = other DNA
tgcctggtgggctctagcgagattatcacaagaaactacggcaagaccaccatcaaggaagtggtcgagatcttcgacaacgacaagaatatccaggtgctggccttcaacacccacaccgataatatcgagtgggcccctatcaaggccgctcagctgaccagacctaacgccgagctggttgaactggaaatcgacaccctgcacggcgtgaaaacaatccggtgcacccctgaccaccccgtgtacaccaagaacagaggctacgtgcgggccgacgagctgacagatgatgacgagctcgtggtggctatc

SEQ ID NO: 398 - protein, 105 aa, synthetic construct
CLVGSSEIITRNYGKTTIKEVVEIFDNDKNIQVLAFNTHTDNIEWAPIKAAQLTRPNAELVELEIDTLHGVKTIRCTPDHPVYTKNRGYVRADELTDDDELVVAI

SEQ ID NO: 399 - DNA, 306 bp, synthetic construct
  source 1..306: mol_type = other DNA
tgcctgagctacgagacagagatcctgaccgtggaatatggcctgctgccaatcggaaagatcgtggaaaagcggatcgagtgcaccgtctacagcgtggacaacaacggaaatatctatacacagcctgtggcccaatggcacgaccggggcgaacaggaggtgtttgagtactgcctggaagatggttctctgattagagccaccaaggaccacaagttcatgaccgtcgacggccagatgctgcccatcgacgaaatcttcgagcgggaactcgacctgatgagagtggataacctgcccaat

SEQ ID NO: 400 - protein, 102 aa, synthetic construct; identical to SEQ ID NO: 371

SEQ ID NO: 401 - protein, 101 aa, synthetic construct; identical to SEQ ID NO: 375

SEQ ID NO: 402 - protein, 102 aa, synthetic construct; identical to SEQ ID NO: 371

SEQ ID NO: 403 - DNA, 279 bp, synthetic construct
  source 1..279: mol_type = other DNA
acaagaagcggatactgtctggacctcaagacccaagtgcagacacctcagggcatgaaagagattagcaatatccaggtgggcgacctggtcctgagcaacaccggctacaacgaggtgctgaacgtgttccctaagtccaagaagaaatcttataagatcaccctggaagatggcaaggaaatcatctgcagcgaggaacacctgttccccacccagaccggcgagatgaacatcagcggcggactgaaggagggcatgtgcctgtacgtgaaggag

SEQ ID NO: 404 - protein, 93 aa, synthetic construct
TRSGYCLDLKTQVQTPQGMKEISNIQVGDLVLSNTGYNEVLNVFPKSKKKSYKITLEDGKEIICSEEHLFPTQTGEMNISGGLKEGMCLYVKE

SEQ ID NO: 405 - DNA, 282 bp, synthetic construct
  source 1..282: mol_type = other DNA
tctcagctgaaccggtgcctgagcctggacaccatggtggtgacaaacggcaaggccatcgagatcagagatgtgaaggtgggagattggctggaaagcgaatgtggcccagtgcaggttacagaggtgctgcctatcatcaagcagcctgtctttgagattgtgctgaaaagcggaaaaaagatccgggtgtccgctaatcacaagttccccaccaaggacggcctcaagaccatcaacagcggcctgaaggtgggcgacttcctgagaagcagagccaag

SEQ ID NO: 406 - protein, 94 aa, synthetic construct
SQLNRCLSLDTMVVTNGKAIEIRDVKVGDWLESECGPVQVTEVLPIIKQPVFEIVLKSGKKIRVSANHKFPTKDGLKTINSGLKVGDFLRSRAK

SEQ ID NO: 407 - DNA, 318 bp, synthetic construct
  source 1..318: mol_type = other DNA
ggcatcggcggaggatgttttgtgcctggcaccctggtgaacacagagaatggcctgaagaaaatcgaggaaatcaaggtgggcgacaaggtgttcagccatacaggcaagctgcaggaggtggtggacaccctgatcttcgaccgggacgaggaaatcatctctatcaacggcattgattgcaccaagaaccacgagttctacgtgatcgataaggaaaacgctaatagagtgaacgaggacaacatccacctcttcgccagatgggtccacgccgaggaactggatatgaaaaagcacctgctgatcgagctggaa

SEQ ID NO: 408 - protein, 106 aa, synthetic construct
GIGGGCFVPGTLVNTENGLKKIEEIKVGDKVFSHTGKLQEVVDTLIFDRDEEIISINGIDCTKNHEFYVIDKENANRVNEDNIHLFARWVHAEELDMKKHLLIELE

SEQ ID NO: 409 - DNA, 330 bp, synthetic construct
  source 1..330: mol_type = other DNA
ggaacaaacccatgttgcctggtgggctctagcgagattatcacaagaaactacggcaagaccaccatcaaggaagtggtcgagatcttcgacaacgacaagaatatccaggtgctggccttcaacacccacaccgataatatcgagtgggcccctatcaaggccgctcagctgaccagacctaacgccgagctggttgaactggaaatcgacaccctgcacggcgtgaaaacaatccggtgcacccctgaccaccccgtgtacaccaagaacagaggctacgtgcgggccgacgagctgacagatgatgacgagctcgtggtggctatc

SEQ ID NO: 410 - protein, 110 aa, synthetic construct
GTNPCCLVGSSEIITRNYGKTTIKEVVEIFDNDKNIQVLAFNTHTDNIEWAPIKAAQLTRPNAELVELEIDTLHGVKTIRCTPDHPVYTKNRGYVRADELTDDDELVVAI

SEQ ID NO: 411 - DNA, 105 bp, synthetic construct
  source 1..105: mol_type = other DNA
gtcaagatcatcagcagaaagagcctgggcacccagaacgtgtacgatatcggagtgggcgagccccacaactttctgctcaagaatggcctggtggccagcaac

SEQ ID NO: 412 - protein, 35 aa, synthetic construct
VKIISRKSLGTQNVYDIGVGEPHNFLLKNGLVASN

SEQ ID NO: 413 - DNA, 114 bp, synthetic construct
  source 1..114: mol_type = other DNA
atgatgctgaaaaagatcctgaagatcgaggaactggatgagagagagctgatcgacatcgaagtgtctggcaatcacctgttctacgccaacgacatcctgacccacaacagc

SEQ ID NO: 414 - protein, 38 aa, synthetic construct
MMLKKILKIEELDERELIDIEVSGNHLFYANDILTHNS

SEQ ID NO: 415 - DNA, 138 bp, synthetic construct
  source 1..138: mol_type = other DNA
atgtgcgaaatcttcgagaacgagattgattgggacgaaatcgcctctatcgagtacgtgggcgtggaagagacaatcgacatcaacgtgaccaacgacagactgtttttcgccaatggcatcctgacccacaacagc

SEQ ID NO: 416 - protein, 46 aa, synthetic construct
MCEIFENEIDWDEIASIEYVGVEETIDINVTNDRLFFANGILTHNS

SEQ ID NO: 417 - DNA, 123 bp, synthetic construct
  source 1..123: mol_type = other DNA
atgaaattcaagctgaaggaaatcaccagcatcgagacaaagcactacaagggcaaggtgcacgatctgaccgtgaaccaggaccacagctacaacgtcagaggcaccgtggtgcataattct

SEQ ID NO: 418 - protein, 41 aa, synthetic construct
MKFKLKEITSIETKHYKGKVHDLTVNQDHSYNVRGTVVHNS

SEQ ID NO: 419 - DNA, 123 bp, synthetic construct
  source 1..123: mol_type = other DNA
atggaagccaagacctacatcggcaagctgaaatctagaaagatcgtgtccaacgaggatacatacgacatccagaccagcacccacaatttcttcgccaacgacatcctggtgcacaacagc

SEQ ID NO: 420 - protein, 41 aa, synthetic construct
MEAKTYIGKLKSRKIVSNEDTYDIQTSTHNFFANDILVHNS

SEQ ID NO: 421 - DNA, 108 bp, synthetic construct
  source 1..108: mol_type = other DNA
atgatcaagatcgccacaagaaagtacctgggcaagcagaacgtgtacgacatcggcgtggagagagaccacaacttcgccctgaagaacggctttatcgcctctaat

SEQ ID NO: 422 - protein, 36 aa, synthetic construct; identical to SEQ ID NO: 373

SEQ ID NO: 423 - protein, 36 aa, synthetic construct
MVKIISRKSLGTQNVYDIGVGEPHNFLLKNGLVASN

SEQ ID NO: 424 - protein, 35 aa, synthetic construct
IKIATRKYLGKQNVYDIGVERDHNFALKNGFIASN

SEQ ID NO: 425 - DNA, 88 bp, synthetic construct
  source 1..88: mol_type = other DNA; note = SaCas9 scaffold sequence
gttttagtactctgtaatgaaaattacagaatctactaaaacaaggcaaaatgccgtgtttatctcgtcaacttgttggcgagatttt

SEQ ID NO: 426 - protein, 7 aa, synthetic construct
RSVGSVY

SEQ ID NO: 427 - protein, 7 aa, synthetic construct
KTVGTVY

SEQ ID NO: 428 - protein, 7 aa, synthetic construct
RYLGDAS

SEQ ID NO: 429 - protein, 7 aa, synthetic construct
WVLPSGG

SEQ ID NO: 430 - protein, 7 aa, synthetic construct
VTVGSIY

SEQ ID NO: 431 - protein, 7 aa, synthetic construct
VRGSSIL

SEQ ID NO: 432 - protein, 7 aa, synthetic construct
REQQKLW

SEQ ID NO: 433 - protein, 7 aa, synthetic construct
ASNPGRW

SEQ ID NO: 434 - protein, 7 aa, synthetic construct
SLDKPFK

SEQ ID NO: 435 - protein, 7 aa, synthetic construct
TLAVPFK

SEQ ID NO: 436 - protein, 7 aa, synthetic construct
WTLESGH

SEQ ID NO: 437 - protein, 7 aa, synthetic construct
REQKKLW

SEQ ID NO: 438 - protein, 7 aa, synthetic construct
PTQGTVR

SEQ ID NO: 439 - protein, 7 aa, synthetic construct
PTQGTFR

SEQ ID NO: 440 - protein, 7 aa, synthetic construct
PSQGTLR

SEQ ID NO: 441 - protein, 7 aa, synthetic construct
NLGAALS

SEQ ID NO: 442 - protein, 7 aa, synthetic construct
PKPSHGE

SEQ ID NO: 443 - protein, 7 aa, synthetic construct
PTPGTLR

SEQ ID NO: 444 - protein, 7 aa, synthetic construct
PTQGTLR

SEQ ID NO: 445 - protein, 7 aa, synthetic construct
QDGPAVK

SEQ ID NO: 446 - protein, 7 aa, synthetic construct
PNQGTLR

SEQ ID NO: 447 - protein, 7 aa, synthetic construct
ESLAGVR

SEQ ID NO: 448 - protein, 7 aa, synthetic construct
TDALTTK

SEQ ID NO: 449 - protein, 7 aa, synthetic construct
TDAGDGK

SEQ ID NO: 450 - protein, 7 aa, synthetic construct
MTGISIV

SEQ ID NO: 451 - protein, 7 aa, synthetic construct
NGYTEGR

SEQ ID NO: 452 - protein, 7 aa, synthetic construct
SLVTSST

SEQ ID NO: 453 - protein, 7 aa, synthetic construct
PTQGTIR

SEQ ID NO: 454 - protein, 736 aa, Dependoparvovirus sp.
  source 1..736: note = serotype AAV9
MAADGYLPDWLEDNLSEGIREWWALKPGAPQPKANQQHQDNARGLVLPGYKYLGPGNGLDKGEPVNAADAAALEHDKAYDQQLKAGDNPYLKYNHADAEFQERLKEDTSFGGNLGRAVFQAKKRLLEPLGLVEEAAKTAPGKKRPVEQSPQEPDSSAGIGKSGAQPAKKRLNFGQTGDTESVPDPQPIGEPPAAPSGVGSLTMASGGGAPVADNNEGADGVGSSSGNWHCDSQWLGDRVITTSTRTWALPTYNNHLYKQISNSTSGGSSNDNAYFGYSTPWGYFDFNRFHCHFSPRDWQRLINNNWGFRPKRLNFKLFNIQVKEVTDNNGVKTIANNLTSTVQVFTDSDYQLPYVLGSAHEGCLPPFPADVFMIPQYGYLTLNDGSQAVGRSSFYCLEYFPSQMLRTGNNFQFSYEFENVPFHSSYAHSQSLDRLMNPLIDQYLYYLSKTINGSGQNQQTLKFSVAGPSNMAVQGRNYIPGPSYRQQRVSTTVTQNNNSEFAWPGASSWALNGRNSLMNPGPAMASHKEGEDRFFPLSGSLIFGKQGTGRDNVDADKVMITNEEEIKTTNPVATESYGQVATNHQSAQAQAQTGWVQNQGILPGMVWQDRDVYLQGPIWAKIPHTDGNFHPSPLMGGFGMKHPPPQILIKNTPVPADPPTAFNKDKLNSFITQYSTGQVSVEIEWELQKENSKRWNPEIQYTSNYYKSNNVEFAVNTEGVYSEPRPIGTRYLTRNL

SEQ ID NO: 455 - protein, 98 aa, synthetic construct
CLSYDTEILTVEYGLIPIGEIVEKKIECTVYTIDNNGLIYTQSIEQWHHRGYQELFEYILEDGSTIRATKDHKFMTSERQMLPIEEIFERGWELKQVL

SEQ ID NO: 456 - protein, 99 aa, synthetic construct
CLSSDTEVITEEYGPIAIGKIVDEGIRCSVYSVDNNGNLYTQPISQWHDRGRQEIYEYYLENGSVIRATKDHKFMTKDGEMLPIDEIFEKGLELKQVLP

SEQ ID NO: 457 - protein, 99 aa, synthetic construct
CLSYETEVLTVEYGFMPIGKIVEERIRCSVYTVDKNGFIYSQPIAQWHQRGLQEVYEYDLENGSIIRATKEHQFMTNDGQMLAIHEIFTRKLDLLQSQE

SEQ ID NO: 458 - protein, 35 aa, synthetic construct
MKVISRKSLGTQPVYDICVTHDHNFLMKNGLIASN

SEQ ID NO: 459 - protein, 36 aa, synthetic construct
MDVKIVSYKFLGSENVYDILERDHNFLIKNGLVASN

SEQ ID NO: 460 - protein, 36 aa, synthetic construct
MVKIITYKSLGRQKVYDLGLEQDHNFVLANGLVASN

SEQ ID NO: 461 - protein, 36 aa, synthetic construct
MVKIISRKYLDTQPVYDVGVQKDHNFLISNGSIASN

SEQ ID NO: 462 - protein, 36 aa, synthetic construct
MVKIATRRSLGTEPVYDIGLQQEHNFLLANGLVASN

SEQ ID NO: 463 - protein, 1380 aa, synthetic construct
MKKPYSIGLDIGTNSVGWAVITDDYKVPAKKMKVLGNTDRSHIKKNLIGALLFDAGNTAEDRRLKRTARRRYTRRRNRILYLQEIFAEEMNKIDESFFHRLDDSFLVPEDKRGSKYPIFATLQEEKEYHKQFPTIYHLRKQLAESNEKADLRLVYLALAHMIKYRGHFLIDDPKFKVQNNDIQGLFEKFVEEYDNVQETSLSKIKLNVTEILTAKIPKSEKQEQLLKNYPSEKKNTLFGNLIGLALGLTPNFKTNFSLENDAKLQISSESYEEDLGSLLALIGENFIELFSAVKNLSDGILLAGIVSDESPHAPLSTKMVIRFKEHEEDLAALKHFIKANLPEKYDEVFSDDSKNGYAGYVGVDSKVRKRNGKLATEEEFYKYLKDILNNVKGADYFLEKIKREDLLRKQRTFDNGTIPYQVHLEEMKAILQNQGEYYPFLKENKEKIQQILTFRIPYYVGPLARGNRDFAWLTRNSDQAIRPWNFEEVVDKASSAEDFINKMTNYDLYLPEEKVLPKHSLLYETFAVYNELTKVKFIAEGLRDYQFLDSGQKKQIVNQLFKEKRKVTEKDIIHYLHNVDGYDGIELKGIEKQFNASLSTYHDLLKIIKDKEFMDDPKNEEILENIVHTLTIFEDREMIKQRLAQYDSLFDEKVIKALTRRHYTGWGKLSAKLINGICDKQTNKTILDFLIDDDKINRNFMQLINDDGLSFKDIIQKAQVVGKIDDVKQVVQELPGSPAIKKGILQSIKIVDELVKVMGHAPESIVIEMARENQTTARGKKNSQQRYKRIEDALKNLAPGLDSNILKENPTDNIQLQNDRLFLYYLQNGKDMYTGEALDINQLSNYDIDHIVPQAFIKDDSLDNRVLTSSKDNRGKSDNVPSIEVVQKRKAFWQQLLDSKLISERKFNNLTKAERGGLDERDKVGFIKRQLVETRQITKHVAQILDARFNTEVNEKNQKIRKVKIITLKSNLVSNFRKEFGLYKVREINDYHHAHDAYLNAVVAKAILKKYPKLEPEFVYGDYQKYDLKRYISRSKDPKEIEKATEKYFFYSNLLNFFKEEVHYADGTIIKRENIEYSKDTGEIAWNKEKDFATVRKVLSCPQVNIVKKTEVQTGGFSKESILPKRNSDKLIARKKDWDPKKYGGFDSPTVAYSVLVVAKVEKGKSKKLKSVKELVGITIMERSSFEKDPVDFLEAKGYKEVRKDLIIKLPKYSLFELENGRKRMLASAGELQKGNELALPSKYVNFLYLASHYEKLKGSPEDNEQKQLFVEQHKHYLDEIIEQISEFSKRVILADANLDKVLSAYNKHRDKPIREQAENIIHLFTLTNLGAPAAFKYFDTTIDRKRYTSTKEVLDATLIHQSITGLYETRIDLSQLGGD

SEQ ID NO: 464 - DNA, 4140 bp, synthetic construct
  source 1..4140: mol_type = other DNA
atgaagaagccttattccatcggcttggacatcgggactaactccgtcggatgggctgtgattaccgacgactacaaggttcccgcaaaaaagatgaaagtgctcggcaatacagatcggtcacatattaagaagaacctgattggcgctctgcttttcgatgcaggtaatactgccgaggataggcgcctcaagagaacagcccggcgtagatacactcgcagaaggaaccggattctgtacctgcaagaaatttttgctgaagaaatgaataagatcgatgagtcattcttccaccgactggacgatagtttcctggtacctgaagacaaaaggggatccaagtaccccatttttgccacactccaagaagagaaggagtaccacaagcaatttccgaccatctaccaccttaggaagcagctggcagagtccaacgaaaaggcagacttgcggttagtctacctggctcttgcacacatgataaagtaccggggacatttcttaattgacgaccctaagtttaaagttcagaataacgatattcaaggcctcttcgaaaagtttgttgaggaatatgataacgtacaagaaacctctttgtctaaaattaagctcaatgtgactgagatcctcacagcaaagattcccaaaagcgagaaacaagagcaactcctgaagaactaccctagtgagaaaaagaacaccctttttggcaatctgatcgggctcgccctgggcctgacacctaacttcaaaacaaatttctccctggagaacgacgccaagctgcaaatctcatccgagagttacgaggaagacttaggatctctcctcgcactgattggagaaaacttcattgaactcttctccgccgtgaaaaatctgagtgacggcatccttctggccggaatcgtctctgacgagagtccccacgcgccgctgagcacaaagatggtcatccggttcaaagagcacgaagaagatctcgcggcactcaaacatttcatcaaagccaacttgccagaaaaatacgatgaagtattctccgacgatagcaaaaacggctatgcgggatacgtaggagtcgacagcaaggtgcggaagcgcaatggtaagcttgctacagaagaagaattttacaagtaccttaaagatatcctcaataatgttaagggggccgactacttcctcgaaaagatcaaaagggaggacctgttgaggaaacagcgtacctttgacaacggcacaatcccgtaccaggtgcacctcgaagaaatgaaagccattctgcagaaccagggggaatactatccattcctcaaggaaaacaaggaaaaaatccagcagatccttacgtttaggattccttactatgtgggccctttggcaaggggtaaccgggatttcgcttggctcaccaggaatagtgaccaggccataaggccctggaactttgaagaagtcgtcgacaaggcctcttccgccgaagacttcattaacaaaatgactaactacgatctctacctgccagaggaaaaagtccttccaaaacatagcctgctttacgaaaccttcgccgtatacaacgagcttacaaaagtcaagttcatcgcagagggtctcagggattaccaattccttgactctggccaaaaaaagcagatcgtgaatcaacttttcaaggagaaacgaaaggtgactgaaaaggacatcattcactacctgcacaacgtcgatggatacgacgggattgaactgaagggcatagaaaagcagttcaatgctagtttgtccacgtaccacgatctgcttaaaatcattaaggataaggaattcatggatgaccctaagaacgaagagattttggaaaacatcgtccacaccctgaccattttcgaggatagggagatgataaagcaacggctggcacagtacgactcactttttgacgagaaggtgataaaagcccttacaagaaggcattataccgggtggggcaagctctccgctaagctgatcaatggtatttgcgacaagcagaccaataagactattttggacttcctgattgacgatgataagataaaccgaaactttatgcagctgattaatgatgatggactgagctttaaagatatcattcagaaggcccaggtcgtcggcaagatcgacgacgtcaaacaggtggtgcaggaacttccaggatccccggccattaagaagggaatattacagtccatcaaaattgtggatgagctggtgaaagtcatgggacatgcacctgagtctatcgtcatagagatggctcgtgaaaaccagacgacagcccgaggaaagaagaacagccaacaacggtataaacggatcgaggatgcacttaagaatctggccccggggctggattctaatatcttaaaagaaaatccaaccgataatattcaacttcagaacgaccggctttttctgtattaccttcagaatggaaaagatatgtataccggagaagccctggatataaatcagctgagtaactatgatatcgaccacattgtgcctcaggctttcattaaggatgacagcctggacaatcgcgtactcacatcctccaaggacaacagaggcaagagcgataacgtccctagcatcgaagtggtacaaaagcgtaaggccttctggcagcagctcttagactctaaattgataagcgaacggaaattcaataacctcacaaaggccgagcgtggtggcttggacgagagagacaaggtgggcttcattaaacggcagctcgtggaaaccagacagataaccaagcacgttgcccagatcctcgatgccaggttcaacaccgaagttaacgagaaaaaccaaaagattcggaaagtgaagatcatcactctcaagtctaatttggtgtccaactttagaaaagagtttggactctataaggtccgagagattaatgattatcaccacgctcacgatgcctacctcaacgcagtggtggccaaggccatcctgaaaaaatatcctaagctcgagcctgagttcgtctatggtgactatcagaagtacgacctcaagcgctatattagtaggagcaaggatcctaaagagatcgaaaaggccacagaaaagtacttcttttacagcaacttactcaacttcttcaaagaagaagtccactacgctgatggcaccatcatcaagcgagaaaatatagagtacagtaaggacacaggcgaaatcgcctggaataaagagaaggatttcgctactgtgcgaaaagttctgtcttgcccccaggtgaacattgtgaaaaagactgaggtgcagactggcgggtttagcaaagagagtatcctgccaaagcggaatagcgataagttaattgctcggaaaaaggactgggatccaaagaagtacggcggcttcgattccccaaccgttgcctacagcgtcctcgtcgtcgccaaggtggagaagggtaaaagcaagaagctgaaaagtgtaaaggaactggtcggcattaccattatggagcggagttccttcgaaaaggatccagttgattttttagaagccaaggggtataaggaggtgcgcaaggatttaattattaaactccccaagtacagcctgtttgagctggagaacggaaggaagaggatgctggctagcgccggcgagctccaaaagggcaatgagctcgccctgccaagcaagtacgtgaactttctctatctggctagccactacgagaagctgaagggatcacctgaagacaatgagcagaaacagctgttcgtcgagcagcataaacactacctcgacgaaattattgagcaaattagtgagttctcaaagcgggtaatcctcgcagatgcaaatctggataaagtgttaagcgcgtataataagcaccgggacaaaccaatccgggagcaagccgagaacatcattcatctcttcacactgaccaatcttggggctcctgcagcttttaaatatttcgatacaaccatcgacaggaagcgatatacttctacaaaggaagtgcttgatgcaactctcatccatcaaagcatcacggggctgtatgaaacccggattgacctgagtcagctgggtggggac

SEQ ID NO: 465 - RNA, 86 nt, synthetic construct
  source 1..86: mol_type = other RNA
gttttagagctgtgttgaaaaacacagcaagttaaaataaggctttgtccgtatccaacttgaaaaagtgagcaccgattcggtgc

SEQ ID NO: 466 - RNA, 78 nt, synthetic construct
  source 1..78: mol_type = other RNA
gttttagagctggaaacagcaagttaaaataaggctttgtccgtatccaacttgaaaaagtgagcaccgattcggtgc

SEQ ID NO: 467 - RNA, 76 nt, synthetic construct; identical to SEQ ID NO: 319
  source 1..76: mol_type = other RNA

SEQ ID NO: 468 - protein, 12 aa, synthetic construct
EGGSEEEEESGS

SEQ ID NO: 469 - protein, 12 aa, synthetic construct
KGPKPKKEESEK

SEQ ID NO: 470 - protein, 166 aa, synthetic construct
SEVEFSHEYWMRHALTLAKRARDEREVPVGAVLVLNNRVIGEGWNRAIGLHDPTAHAEIMALRQGGLVMQNYRLIDATLYVTFEPCVMCAGAMIHSRIGRVVFGVRNSKRGAAGSLMNVLNYPGMNHRVEITEGILADECAALLCDFYRMPRQVFNAQKKAQSSIN

SEQ ID NO: 471 - protein, 166 aa, synthetic construct
SEVEFSHEYWMRHALTLAKRARDEGEVPVGAVLVLNNRVIGEGWNRAIGLYDPTAHAEIMALRQGGLVMQNYRLIDATLYVTFEPCVMCAGAMIHSRIGRVVFGVRNSKRGAAGSLMNVLNYPGMDHRVEITEGILADECAALLCDFYRMPRQVFNAQKKAQSSIN

SEQ ID NO: 472 - protein, 166 aa, synthetic construct
SEVEFSHEYWMRHALTLAKRARDEGEVPVGAVLVLNNRVIGEGWNRAIGLHDPTAHAEIMALRQGGLVMQNYRLIDATLYVTFEPCVMCAGAMIHSRIGRVVFGVRNSKRGAAGSLMNVLNYPGMDHRVEITEGILADECAALLCDFYRMPRQVFNAQKKAQSSIN

SEQ ID NO: 473 - protein, 166 aa, synthetic construct
SEVEFSHEYWMRHALTLAKRARDEREVPVGAVLVLNNRVIGEGWNRAIGLHDPTAHAEIMALRQGGLVMQNYGLIDATLYVTFEPCVMCAGAIIHSRIGRVVFGVRNSKRGAAGSLMNVLNYPGMNHRVEITEGILADECAALLCDFYRMPRQVFNAQKKAQSSIN

SEQ ID NO: 474 - protein, 166 aa, synthetic construct
SEVEFSHEYWMRHALTLAKRARDEREVPVGAVLVLNNRVIGEGWNRAIGLHDPTAHAEIMALRQGGLVMQNYRLIDATLYVTFEPCVMCAGAMIHSRIGRVVFGVRNSKRGAAGSLMNVLNYPGMDHRVEITEGILADECAALLCDFYRMPRQVFNAQKKAQSSIN

SEQ ID NO: 475 - protein, 166 aa, synthetic construct
SEVEFSHEYWMRHALTLAKRARDEGEVPVGAVLVLNNRVIGEGWNRAIGLYDPTAHAEIMALRQGGLVMQNYGLIDATLYVTFEPCVMCAGAMIHSRIGRVVFGVRNSKRGAAGSLMNVLNYPGMDHRVEITEGILADECAALLCDFYRMPRQVFNAQKKAQSSIN

SEQ ID NO: 476 - protein, 166 aa, synthetic construct
SEVEFSHEYWMRHALTLAKRARDEGEVPVGAVLVLNNRVIGEGWNRAIGLYDPTAHAEIMALRQGGLVMQNYGLIDATLYSTFEPCVMCAGAMIHSRIGRVVFGVRNSKRGAAGSLMNVLNYPGMDHRVEITEGILADECAALLCDFYRMPRRVFNAQKKAQSSIN

SEQ ID NO: 477 - protein, 166 aa, synthetic construct
SEVEFSHEYWMRHALTLAKRARDEGEVPVGAVLVLNNRVIGEGWNRAIGLYDPTAHAEIMALRQGGLVMQNYRLIDATLYVTFEPCVMCAGAMIHSRIGRVVFGVRNSKRGAAGSLMNVLNYPGMDHRVEITEGILANECAALLCDFYRMPRQVFNAQKKAQSSIN

SEQ ID NO: 478 - protein, 166 aa, synthetic construct
SEVEFSHEYWMRHALTLAKRARDEREVPVGAVLVLNNRVIGEGWNRAIGLHDPTAHAEIMALRQGGLVMQNYRLYDATLYSTFEPCVMCAGAMIHSRIGRVVFGVRNAKTGAAGSLMDVLHHPGMNHRVEITEGILADECAALLCRFFRMPRRVFNAQKKAQSSTD

SEQ ID NO: 479 - protein, 160 aa, Staphylococcus aureus; identical to SEQ ID NO: 309

SEQ ID NO: 480 - protein, 161 aa, Bacillus subtilis; identical to SEQ ID NO: 310

SEQ ID NO: 481 - protein, 183 aa, Salmonella enterica; identical to SEQ ID NO: 311
  source 1..183: note = serovar Typhimurium

SEQ ID NO: 482 - protein, 164 aa, Shewanella putrefaciens; identical to SEQ ID NO: 312

SEQ ID NO: 483 - protein, 173 aa, Haemophilus influenzae; identical to SEQ ID NO: 313

SEQ ID NO: 484 - protein, 161 aa, Caulobacter crescentus; identical to SEQ ID NO: 314

SEQ ID NO: 485 - protein, 178 aa, Geobacter sulfurreducens
MSSLKKTPIRDDAYWMGKAIREAAKAAARDEVPIGAVIVRDGAVIGRGHNLREGSNDPSAHAEMIAIRQAARRSANWRLTGATLYVTLEPCLMCMGAIILARLERVVFGCYDPKGAAGSLYDLSADPRLNHQVRLSPGVCQEECGTMLSDFFRDLRRRKKAKATPALFIDERKVPPEP

SEQ ID NO: 486 - protein, 171 aa, Streptococcus pyogenes
MPYSLEEQTYFMQEALKEAEKSLQKAEIPIGCVIVKDGEIIGRGHNAREESNQAIMHAEIMAINEANAHEGNWRLLDTTLFVTIEPCVMCSGAIGLARIPHVIYGASNQKFGGADSLYQILTDERLNHRVQVERGLLAADCANIMQTFFRQGRERKKIAKHLIKEQSDPFD

SEQ ID NO: 487 - protein, 151 aa, Aquifex aeolicus
MGKEYFLKVALREAKRAFEKGEVPVGAIIVKEGEIISKAHNSVEELKDPTAHAEMLAIKEACRRLNTKYLEGCELYVTLEPCIMCSYALVLSRIEKVIFSALDKKHGGVVSVFNILDEPTLNHRVKWEYYPLEEASELLSEFFKKLRNNII

SEQ ID NO: 488 - protein, 178 aa, Escherichia coli
MRRAFITGVFFLSEVEFSHEYWMRHALTLAKRAWDEREVPVGAVLVHNNRVIGEGWNRPIGRHDPTAHAEIMALRQGGLVMQNYRLIDATLYVTLEPCVMCAGAMIHSRIGRVVFGARDAKTGAAGSLMDVLHHPGMNHRVEITEGILADECAALLSDFFRMRRQEIKAQKKAQSSTD

SEQ ID NO: 489 - protein, 167 aa, synthetic construct
MSEVEFSHEYWMRHALTLAKRARDEREVPVGAVLVLNNRVIGEGWNRAIGLHDPTAHAEIMALRQGGLVMQNYRLIDATLYVTFEPCVMCAGAMIHSRIGRVVFGVRNSKRGAAGSLMNVLNYPGMNHRVEITEGILADECAALLCDFYRMPRQVFNAQKKAQSSIN

SEQ ID NO: 490 - protein, 167 aa, synthetic construct
MSEVEFSHEYWMRHALTLAKRARDEGAGPVGAVLVLNNRVIGEGWNRAIGLHDPTAHAEIMALRQGGLVMQNYRLFDATLYVTFEPCVMCAGAMINSRIGRVVFGVRNSKRGAAGSLMNVLNYPGMNHRVEITEGILADECAALLCDFYRMPRQVFNSQKKAQSSIN

SEQ ID NO: 491 - protein, 167 aa, synthetic construct
MSEVEFSHEYWMRHALTLAKRARDEGAGPVGAVLVLNNRVIGEGWNRAIGLHDPTAHAEIMALRQGGLVMQNYRLFDATLYVTFEPCVMCAGAMINSRIGRVVFGVRNSKRGAAGSLMNVLNYPGMNHRVEITEGILADECAALLCDFYRMPRRVFNSQKKAQSSIN

SEQ ID NO: 492 - protein, 167 aa, synthetic construct
MSEVEFSHEYWMRHALTLAKRARDEGAGPVGAVLVLNNRVIGEGWNRAIGLHDPTAHAEIMALRQGGLVMQNYRLFDATLYVTFEPCVMCAGAMINSRIGRVVFGVRNSKRGAAGSLMNVLNYPGMNHRVEITEGILADECAALLCDFYRIPRQVFNSQKKAQSSIN

SEQ ID NO: 493 - protein, 167 aa, synthetic construct
MSEVEFSHEYWMRHALTLAKRARDERKAPVGAVLVLNNRVIGEGWNRAIGLHDPTAHAEIIALRQGGLVMQNYRLIDATLYVTFEPCVMCAGAMINSRIGRVVFGVRNSKRGAAGSLMNVLNYPGMNHRVEITEGILADECAALLCDFYRMPRQVFNAQKKAQSSIN

SEQ ID NO: 494 - protein, 167 aa, synthetic construct
MSEVEFSHEYWMRHALTLAKRARDERAGPVGAVLVLNNRVIGEGWNRAIGLHDPTAHAEIMALRQGGLVMQNHRLIDATLYVTFEPCVMCAGAMINSRIGRVVFGVRNSKRGAAGSLMNVLNYPGMNHRVEITEGILADECAALLCDFYRMPRHVFNSQKKAQSSIN

SEQ ID NO: 495 - protein, 167 aa, synthetic construct
MSEVEFSHEYWMRHALTLAKRARDEGEAPVGAVLVLNNRVIGEGWNRRIGLHDPTAHAEIMALRQGGLVMQNSRLIDATLYVTFEPCVMCAGAMINSRIGRVVFGVRNSKRGAAGSLMNVLNYPGMNHRVEITEGILADECAALLCDFYRMPRQVFNAQKKAQSSIN

SEQ ID NO: 496 - protein, 167 aa, synthetic construct
MSEVEFSHEYWMRHALTLAKRARDEGEGPVGAVLVLNNRVIGEGWNRRIGLHDPTAHAEIMALRQGGLVMQNCRLIDATLYVTFEPCVMCAGAMIHSRIGRVVFGVRNSKRGAAGSLMNVLNYPGMNHRVEITEGILADECAALLCDFYRMPRQVFNAQKKAQSSIN

SEQ ID NO: 497 - protein, 167 aa, synthetic construct
MSEVEFSHEYWMRHALTLAKRARDEGEAPVGAVLVLNNRVIGEGWIRRIGLHDPTAHAEIMALRQGGLVMQNPRLIDATLYVTFEPCVMCAGAMINSRIGRVVFGVRNSKRGAAGSLMNVLNYPGMNHRVEITEGILADECAALLCDFYRMPRQVFNAQKKAQSSIN

SEQ ID NO: 498 - protein, 167 aa, synthetic construct
MSEVEFSHEYWMRHALTLAKRARDEGEAPVGAVLVLNNRVIGEGWTRRIGLHDPTAHAEIMALRQGGLVMQNSRLIDATLYVTFEPCVMCAGAMINSRIGRVVFGVRNSKRGAAGSLMNVLNYPGMNHRVEITEGILADECAALLCDFYRMPRHVFNAQKKAQSSIN

SEQ ID NO: 499 - protein, 167 aa, synthetic construct
MSEVEFSHEYWMRHALTLAKRARDEGEAPVGAVLVLNNRVIGEGWTRRIGLHDPTAHAEIMALRQGGLVMQNSRLIDATLYVTFEPCVMCAGAMINSRIGRVVFGVRNSKRGAAGSLMNVLNYPGMNHRVEITEGILADECAALLCDFYRMPRQVFNAQKKAQSSIN

SEQ ID NO: 500 - protein, 167 aa, synthetic construct
MSEVEFSHEYWMRHALTLAKRARDEGEAPVGAVLVLNNRVIGEGWVRRIGLHDPTAHAEIMALRQGGLVMQNSRLIDATLYVTFEPCVMCAGAMINSRIGRVVFGVRNSKRGAAGSLMNVLNYPGMNHRVEITEGILADECAALLCDFYRMPRQVFNAQKKAQSSIN

SEQ ID NO: 501 - protein, 167 aa, synthetic construct
MSEVEFSHEYWMRHALTLAKRARDEGEAPVGAVLVLNNRVIGEGWVRRIGLHDPTAHAEIMALRQGGLVMQNPRLIDATLYVTFEPCVMCAGAMINSRIGRVVFSVRNSKRGAAGSLMNVLNYPGMNHRVEITEGILADECAALLCDFYRMPRQVFNAQKKAQSSIN

SEQ ID NO: 502 - protein, 167 aa, synthetic construct
MSEVEFSHEYWMRHALTLAKRARDEGEAPVGAVLVLNNRVIGEGWLRRIGLHDPTAHAEIMALRQGGLVMQNPRLIDATLYVTFEPCVMCAGAMINSRIGRVVFGVRNSKRGAAGSLMNVLNYPGMNHRVEITEGILADECAALLCDFYRMPRQVFNAQKKAQSSIN

SEQ ID NO: 503 - protein, 167 aa, synthetic construct
MSEVEFSHEYWMRHALTLAKRARDEREAPVGAVLVLNNRVIGEGWLRPIGLHDPTAHAEIMALRQGGLVMQNPRLIDATLYVTFEPCVMCAGAMIHSRIGRVVFGVRNSKRGAAGSLMNVLNYPGMNHRVEITEGILADECAALLCDFYRMPRQVFNAQKKAQSSIN

SEQ ID NO: 504 - protein, 167 aa, synthetic construct
MSEVEFSHEYWMRHALTLAKRARDEGEAPVGAVLVLNNRVIGEGWCRRIGLHDPTAHAEIMALRQGGLVMQNSRLIDATLYVTFEPCVMCAGAMIHSRIGRVVFGVRNSKRGAAGSLMNVLNYPGMNHRVEITEGILADECAALLCDFYRMPRQVFNAQKKAQSSIN

SEQ ID NO: 505 - protein, 167 aa, synthetic construct
MSEVEFSHEYWMRHALTLAKRARDEGEAPVGAVLVLNNRVIGEGWVRRIGLHDPTAHAEIMALRQGGLVMQNPRLIDATLYVTFEPCVMCAGAMINSRIGRVVFGVRNSKRGAAGSLMNVLNYPGMNHRVEITEGILADECAALLCDFYRMPRQVFNAQKKAQSSIN

SEQ ID NO: 506 - protein, 167 aa, synthetic construct
MSEVEFSHEYWMRHALTLAKRARDEGEAPVGAVLVLNNRVIGEGWVRRIGLHDPTAHAEIMALRQGGLVMHNPRLIDATLYVTFEPCVMCAGAMINSRIGRVVFGVRNSKRGAAGSLMNVLNYPGMNHRVEITEGILADECAALLCDFYRMPRQVFNAQKKAQSSIN

SEQ ID NO: 507 - protein, 167 aa, synthetic construct
MSEVEFSHEYWMRHALTLAKRARDEGEAPVGAVLVLNNRVIGEGWLRRIGLHDPTAHAEIMALRQGGLVMQNSRLIDATLYVTFEPCVMCAGAMINSRIGRVVFGVRNSKRGAAGSLMNVLNYPGMNHRVEITEGILADECAALLCDFYRMPRQVFNAQKKAQSSIN

SEQ ID NO: 508 - protein, 167 aa, synthetic construct
MSEVEFSHEYWMRHALTLAKRARDEGEAPVGAVLVLNNRVIGEGWCRRIGLHDPTAHAEIMALRQGGLVMQNPRLIDATLYVTFEPCVMCAGAMINSRIGRVVFGVRNSKRGAAGSLMNVLNYPGMNHRVEITEGILADECAALLCDFYRMPRQVFNAQKKAQSSIN

SEQ ID NO: 509 - protein, 167 aa, synthetic construct
MSEVEFSHEYWMRHALTLAKRARDEGEAPVGAVLVLNNRVIGEGWCRRIGLHDPTAHAEIMALRQGGLVMQNPRLIDATLYVTFEPCVMCAGAMINSRIGRVVFGVRNSKRGAAGSLMNVLNYPGMNHRVEITEGILADECAALLCDFYRMPRQVFNAQKKVQSSIN

SEQ ID NO: 510 - protein, 167 aa, synthetic construct
MSEVEFSHEYWMRHALTLAKRARDEGEAPVGAVLVLNNRVIGEGWIRRIGLHDPTAHAEIMALRQGGLVMQNSRLIDATLYVTFEPCVMCAGAMINSRIGRVVFGVRNSKRGAAGSLMNVLNYPGMNHRVEITEGILADECAALLCDFYRMPRQVFNAQKKAQSSIN

SEQ ID NO: 511 - protein, 167 aa, synthetic construct
MSEVEFSHEYWMRHALTLAKRARDEGEAPVGAVLVLNNRVIGEGWNRRIGLHDPTAHAEIMALRQGGLVMSNSRLIDATLYVTFEPCVMCAGAMINSRIGRVVFGVRNSKRGAAGSLMNVLNYPGMNHRVEITEGILADECAALLCDFYRMPRQVFNAQKKAQSSIN

SEQ ID NO: 512 - protein, 167 aa, synthetic construct
MSEVEFSHEYWMRHALTLAKRARDEGEAPVGAVLVLNNRVIGEGWLRRIGLHDPTAHAEIMALRQGGLVMQNPRLIDATLYVTFEPCVMCAGAMIHSRIGRVVFGVRNSKRGAAGSLMNVLNYPGMNHRVEITEGILADECAALLCDFYRMPRQVFNAQKKAQSSIN

SEQ ID NO: 513 - protein, 167 aa, synthetic construct; identical to SEQ ID NO: 502

SEQ ID NO: 514 - protein, 167 aa, synthetic construct
MSEVEFSHEYWMRHALTLAKRARDEGEAPVGAVLVLNNRVIGEGWNRAIGLHDPTAHAEIMALRQGGLVMQNPRLIDATLYVTFEPCVMCAGAMINSRIGRVVFGVRNSKRGAAGSLMNVLNYPGMNHRVEITEGILADECAALLCDFYRMPRQVFNAQKKAQSSIN

SEQ ID NO: 515 - protein, 167 aa, synthetic construct; identical to SEQ ID NO: 500

SEQ ID NO: 516 - protein, 167 aa, synthetic construct; identical to SEQ ID NO: 505

SEQ ID NO: 517 - protein, 167 aa, synthetic construct
MSEVEFSHEYWMRHALTLAKRARDEGEVPVGAVLVLNNRVIGEGWLRAIGLHDPTAHAEIMALRQGGLVMQNYRLIDATLYVTFEPCVMCAGAMIHSRIGRVVFGVRNSKRGAAGSLMNVLNYPGMNHRVEITEGILADECAALLCDFYRMPRQVFNAQKKAQSSIN

SEQ ID NO: 518 - protein, 167 aa, synthetic construct; identical to SEQ ID NO: 497

SEQ ID NO: 519 - protein, 167 aa, synthetic construct; identical to SEQ ID NO: 501

SEQ ID NO: 520 - protein, 167 aa, synthetic construct
MSEVEFSHEYWMRHALTLAKRARDEGEAPVGAVLVLNNRVIGEGWNRPIGLHDPTAHAEIMALRQGGLVMQNHRLIDAPLYVTFEPCVMCAGAMINSRIGRVVFGVRNSKRGAAGSLMNVLNYPGMNHRVEITEGILADECAALLCDFYRMPRQVFNAQKKAQSSIN

SEQ ID NO: 521 - protein, 167 aa, synthetic construct
MSEVEFSHEYWMRHALTLAKRARDEGEVPVGAVLVLNNRVIGEGWIRAIGLHDPTAHAEIMALRQGGLVMQNYRLIDATLYVTFEPCVMCAGAMINSRIGRVVFGVRNSKRGAAGSLMNVLNYPGMNHRVEITEGILADECAALLCDFYRMPRQVFNAQKKAQSSIN

SEQ ID NO: 522 - protein, 167 aa, synthetic construct; identical to SEQ ID NO: 505

SEQ ID NO: 523 - protein, 167 aa, synthetic construct; identical to SEQ ID NO: 507

SEQ ID NO: 524 - protein, 167 aa, synthetic construct
MSEVEFSHEYWMRHALTLAKRARDEGEAPVGAVLVLNNRVIGEGWCRRIGLHDPTAHAEIMALRQGGLVMQNYRLIDATLYVTFEPCVMCAGAMINSRIGRVVFGVRNSKRGAAGSLMNVLNYPGMNHRVEITEGILADECAALLCDFYRMPRQVFNAQKKVQSSIN

SEQ ID NO: 525 - protein, 167 aa, synthetic construct; identical to SEQ ID NO: 506

SEQ ID NO: 526 - protein, 167 aa, synthetic construct; identical to SEQ ID NO: 508

SEQ ID NO: 527 - protein, 167 aa, synthetic construct; identical to SEQ ID NO: 509

SEQ ID NO: 528 - protein, 167 aa, synthetic construct; identical to SEQ ID NO: 505

SEQ ID NO: 529 - protein, 167 aa, synthetic construct; identical to SEQ ID NO: 500

SEQ ID NO: 530 - protein, 167 aa, synthetic construct
MSEVEFSHEYWMRHALTLAKRARDEGEAPVGAVLVLNNRVIGEGWVRPIGLHDPTAHAEIMALRQGGLVMQNSRLIDATLYVTFEPCVMCAGAMINSRIGRVVFGVRNSKRGAAGSLMNVLNYPGMNHRVEITEGILADECAALLCDFYRMPRQVFNAQKKAQSSIN

SEQ ID NO: 531 - protein, 167 aa, synthetic construct; identical to SEQ ID NO: 508

SEQ ID NO: 532 - protein, 167 aa, synthetic construct
MSEVEFSHEYWMRHALTLAKRARDEGEAPVGAVMVLNNRVIGEGWLRRIGLHDPTAHAEIMALRQGGLVMQNPRLIDATLYVTFEPCVMCAGAMINSRIGRVVFGVRNSKRGAAGSLMNVLNYPGMNHRVEITEGILADECAALLCDFYRMPRQVFNAQKKAQSSIN

SEQ ID NO: 533 - protein, 167 aa, synthetic construct; identical to SEQ ID NO: 502

SEQ ID NO: 534 - protein, 167 aa, synthetic construct
MSEVEFSHEYWMRHALTLAKRARDEGEAPVGAVLVLNNRVIGEGWLRPIGLHDPTAHAEIMALKQGGLVMQNPRLIDATLYVTFEPCVMCAGAMINSRIGRVVFGVRNSKRGAAGSLMNVLNYPGMNHRVEITEGILADECAALLCDFYRMPRQVFNAQKKAQSSIN

SEQ ID NO: 535 - protein, 1699 aa, synthetic construct
MKRTADGSEFESPKKKRKVSSEVEFSHEYWMRHALTLAKRARDEGAGPVGAVLVLNNRVIGEGWNRAIGLHDPTAHAEIMALRQGGLVMQNYRLFDATLYVTFEPCVMCAGAMINSRIGRVVFGVRNSKRGAAGSLMNVLNYPGMNHRVEITEGILADECAALLCDFYRMPRQVFNSQKKAQSSINSGGSSGGSSGSETPGTSESATPESSGGSSGGSDKKYSIGLAIGTNSVGWAVITDEYKVPSKKFKVLGNTDRHSIKKNLIGALLFDSGETAEATRLKRTARRRYTRRKNRICYLQEIFSNEMAKVDDSFFHRLEESFLVEEDKKHERHPIFGNIVDEVAYHEKYPTIYHLRKKLVDSTDKADLRLIYLALAHMIKFRGHFLIEGDLNPDNSDVDKLFIQLVQTYNQLFEENPINASGVDAKAILSARLSKSRRLENLIAQLPGEKKNGLFGNLIALSLGLTPNFKSNFDLAEDAKLQLSKDTYDDDLDNLLAQIGDQYADLFLAAKNLSDAILLSDILRVNTEITKAPLSASMIKRYDEHHQDLTLLKALVRQQLPEKYKEIFFDQSKNGYAGYIDGGASQEEFYKFIKPILEKMDGTEELLVKLNREDLLRKQRTFDNGSIPHQIHLGELHAILRRQEDFYPFLKDNREKIEKILTFRIPYYVGPLARGNSRFAWMTRKSEETITPWNFEEVVDKGASAQSFIERMTNFDKNLPNEKVLPKHSLLYEYFTVYNELTKVKYVTEGMRKPAFLSGEQKKAIVDLLFKTNRKVTVKQLKEDYFKKIECFDSVEISGVEDRFNASLGTYHDLLKIIKDKDFLDNEENEDILEDIVLTLTLFEDREMIEERLKTYAHLFDDKVMKQLKRRRYTGWGRLSRKLINGIRDKQSGKTILDFLKSDGFANRNFMQLIHDDSLTFKEDIQKAQVSGQGDSLHEHIANLAGSPAIKKGILQTVKVVDELVKVMGRHKPENIVIEMARENQTTQKGQKNSRERMKRIEEGIKELGSQILKEHPVENTQLQNEKLYLYYLQNGRDMYVDQELDINRLSDYDVDHIVPQSFLKDDSIDNKVLTRSDKNRGKSDNVPSEEVVKKMKNYWRQLLNAKLITQRKFDNLTKAERGGLSELDKAGFIKRQLVETRQITKHVAQILDSRMNTKYDENDKLIREVKVITLKSKLVSDFRKDFQFYKVREINNYHHAHDAYLNAVVGTALIKKYPKLESEFVYGDYKVYDVRKMIAKSEQEIGKATAKYFFYSNIMNFFKTEITLANGEIRKRPLIETNGETGEIVWDKGRDFATVRKVLSMPQVNIVKKTEVQTGGFSKESILPKRNSDKLIARKKDWDPKKYGGFDSPTVAYSVLVVAKVEKGKSKKLKSVKELLGITIMERSSFEKNPIDFLEAKGYKEVKKDLIIKLPKYSLFELENGRKRMLASAGELQKGNELALPSKYVNFLYLASHYEKLKGSPEDNEQKQLFVEQHKHYLDEIIEQISEFSKRVILADANLDKVLSAYNKHRDKPIREQAENIIHLFTLTNLGAPAAFKYFDTTIDRKRYTSTKEVLDATLIHQSITGLYETRIDLSQLGGDSGGSGGSGGSTNLSDIIEKETGKQLVIQESILMLPEEVEEVIGNKPESDILVHTAYDESTDENVMLLTSDAPEYKPWALVIQDSNGENKIKMLSGGSKRTADGSEFEPKKKRKV

SEQ ID NO: 536 - protein, 1699 aa, synthetic construct
MKRTADGSEFESPKKKRKVSSEVEFSHEYWMRHALTLAKRARDEGAGPVGAVLVLNNRVIGEGWNRAIGLHDPTAHAEIMALRQGGLVMQNYRLFDATLYVTFEPCVMCAGAMINSRIGRVVFGVRNSKRGAAGSLMNVLNYPGMNHRVEITEGILADECAALLCDFYRMPRRVFNSQKKAQSSINSGGSSGGSSGSETPGTSESATPESSGGSSGGSDKKYSIGLAIGTNSVGWAVITDEYKVPSKKFKVLGNTDRHSIKKNLIGALLFDSGETAEATRLKRTARRRYTRRKNRICYLQEIFSNEMAKVDDSFFHRLEESFLVEEDKKHERHPIFGNIVDEVAYHEKYPTIYHLRKKLVDSTDKADLRLIYLALAHMIKFRGHFLIEGDLNPDNSDVDKLFIQLVQTYNQLFEENPINASGVDAKAILSARLSKSRRLENLIAQLPGEKKNGLFGNLIALSLGLTPNFKSNFDLAEDAKLQLSKDTYDDDLDNLLAQIGDQYADLFLAAKNLSDAILLSDILRVNTEITKAPLSASMIKRYDEHHQDLTLLKALVRQQLPEKYKEIFFDQSKNGYAGYIDGGASQEEFYKFIKPILEKMDGTEELLVKLNREDLLRKQRTFDNGSIPHQIHLGELHAILRRQEDFYPFLKDNREKIEKILTFRIPYYVGPLARGNSRFAWMTRKSEETITPWNFEEVVDKGASAQSFIERMTNFDKNLPNEKVLPKHSLLYEYFTVYNELTKVKYVTEGMRKPAFLSGEQKKAIVDLLFKTNRKVTVKQLKEDYFKKIECFDSVEISGVEDRFNASLGTYHDLLKIIKDKDFLDNEENEDILEDIVLTLTLFEDREMIEERLKTYAHLFDDKVMKQLKRRRYTGWGRLSRKLINGIRDKQSGKTILDFLKSDGFANRNFMQLIHDDSLTFKEDIQKAQVSGQGDSLHEHIANLAGSPAIKKGILQTVKVVDELVKVMGRHKPENIVIEMARENQTTQKGQKNSRERMKRIEEGIKELGSQILKEHPVENTQLQNEKLYLYYLQNGRDMYVDQELDINRLSDYDVDHIVPQSFLKDDSIDNKVLTRSDKNRGKSDNVPSEEVVKKMKNYWRQLLNAKLITQRKFDNLTKAERGGLSELDKAGFIKRQLVETRQITKHVAQILDSRMNTKYDENDKLIREVKVITLKSKLVSDFRKDFQFYKVREINNYHHAHDAYLNAVVGTALIKKYPKLESEFVYGDYKVYDVRKMIAKSEQEIGKATAKYFFYSNIMNFFKTEITLANGEIRKRPLIETNGETGEIVWDKGRDFATVRKVLSMPQVNIVKKTEVQTGGFSKESILPKRNSDKLIARKKDWDPKKYGGFDSPTVAYSVLVVAKVEKGKSKKLKSVKELLGITIMERSSFEKNPIDFLEAKGYKEVKKDLIIKLPKYSLFELENGRKRMLASAGELQKGNELALPSKYVNFLYLASHYEKLKGSPEDNEQKQLFVEQHKHYLDEIIEQISEFSKRVILADANLDKVLSAYNKHRDKPIREQAENIIHLFTLTNLGAPAAFKYFDTTIDRKRYTSTKEVLDATLIHQSITGLYETRIDLSQLGGDSGGSGGSGGSTNLSDIIEKETGKQLVIQESILMLPEEVEEVIGNKPESDILVHTAYDESTDENVMLLTSDAPEYKPWALVIQDSNGENKIKMLSGGSKRTADGSEFEPKKKRKV

SEQ ID NO: 537 - protein, 1699 aa, synthetic construct
MKRTADGSEFESPKKKRKVSSEVEFSHEYWMRHALTLAKRARDEGAGPVGAVLVLNNRVIGEGWNRAIGLHDPTAHAEIMALRQGGLVMQNYRLFDATLYVTFEPCVMCAGAMINSRIGRVVFGVRNSKRGAAGSLMNVLNYPGMNHRVEITEGILADECAALLCDFYRIPRQVFNSQKKAQSSINSGGSSGGSSGSETPGTSESATPESSGGSSGGSDKKYSIGLAIGTNSVGWAVITDEYKVPSKKFKVLGNTDRHSIKKNLIGALLFDSGETAEATRLKRTARRRYTRRKNRICYLQEIFSNEMAKVDDSFFHRLEESFLVEEDKKHERHPIFGNIVDEVAYHEKYPTIYHLRKKLVDSTDKADLRLIYLALAHMIKFRGHFLIEGDLNPDNSDVDKLFIQLVQTYNQLFEENPINASGVDAKAILSARLSKSRRLENLIAQLPGEKKNGLFGNLIALSLGLTPNFKSNFDLAEDAKLQLSKDTYDDDLDNLLAQIGDQYADLFLAAKNLSDAILLSDILRVNTEITKAPLSASMIKRYDEHHQDLTLLKALVRQQLPEKYKEIFFDQSKNGYAGYIDGGASQEEFYKFIKPILEKMDGTEELLVKLNREDLLRKQRTFDNGSIPHQIHLGELHAILRRQEDFYPFLKDNREKIEKILTFRIPYYVGPLARGNSRFAWMTRKSEETITPWNFEEVVDKGASAQSFIERMTNFDKNLPNEKVLPKHSLLYEYFTVYNELTKVKYVTEGMRKPAFLSGEQKKAIVDLLFKTNRKVTVKQLKEDYFKKIECFDSVEISGVEDRFNASLGTYHDLLKIIKDKDFLDNEENEDILEDIVLTLTLFEDREMIEERLKTYAHLFDDKVMKQLKRRRYTGWGRLSRKLINGIRDKQSGKTILDFLKSDGFANRNFMQLIHDDSLTFKEDIQKAQVSGQGDSLHEHIANLAGSPAIKKGILQTVKVVDELVKVMGRHKPENIVIEMARENQTTQKGQKNSRERMKRIEEGIKELGSQILKEHPVENTQLQNEKLYLYYLQNGRDMYVDQELDINRLSDYDVDHIVPQSFLKDDSIDNKVLTRSDKNRGKSDNVPSEEVVKKMKNYWRQLLNAKLITQRKFDNLTKAERGGLSELDKAGFIKRQLVETRQITKHVAQILDSRMNTKYDENDKLIREVKVITLKSKLVSDFRKDFQFYKVREINNYHHAHDAYLNAVVGTALIKKYPKLESEFVYGDYKVYDVRKMIAKSEQEIGKATAKYFFYSNIMNFFKTEITLANGEIRKRPLIETNGETGEIVWDKGRDFATVRKVLSMPQVNIVKKTEVQTGGFSKESILPKRNSDKLIARKKDWDPKKYGGFDSPTVAYSVLVVAKVEKGKSKKLKSVKELLGITIMERSSFEKNPIDFLEAKGYKEVKKDLIIKLPKYSLFELENGRKRMLASAGELQKGNELALPSKYVNFLYLASHYEKLKGSPEDNEQKQLFVEQHKHYLDEIIEQISEFSKRVILADANLDKVLSAYNKHRDKPIREQAENIIHLFTLTNLGAPAAFKYFDTTIDRKRYTSTKEVLDATLIHQSITGLYETRIDLSQLGGDSGGSGGSGGSTNLSDIIEKETGKQLVIQESILMLPEEVEEVIGNKPESDILVHTAYDESTDENVMLLTSDAPEYKPWALVIQDSNGENKIKMLSGGSKRTADGSEFEPKKKRKV

SEQ ID NO: 538 - protein, 1699 aa, synthetic construct
MKRTADGSEFESPKKKRKVSSEVEFSHEYWMRHALTLAKRARDERKAPVGAVLVLNNRVIGEGWNRAIGLHDPTAHAEIIALRQGGLVMQNYRLIDATLYVTFEPCVMCAGAMINSRIGRVVFGVRNSKRGAAGSLMNVLNYPGMNHRVEITEGILADECAALLCDFYRMPRQVFNAQKKAQSSINSGGSSGGSSGSETPGTSESATPESSGGSSGGSDKKYSIGLAIGTNSVGWAVITDEYKVPSKKFKVLGNTDRHSIKKNLIGALLFDSGETAEATRLKRTARRRYTRRKNRICYLQEIFSNEMAKVDDSFFHRLEESFLVEEDKKHERHPIFGNIVDEVAYHEKYPTIYHLRKKLVDSTDKADLRLIYLALAHMIKFRGHFLIEGDLNPDNSDVDKLFIQLVQTYNQLFEENPINASGVDAKAILSARLSKSRRLENLIAQLPGEKKNGLFGNLIALSLGLTPNFKSNFDLAEDAKLQLSKDTYDDDLDNLLAQIGDQYADLFLAAKNLSDAILLSDILRVNTEITKAPLSASMIKRYDEHHQDLTLLKALVRQQLPEKYKEIFFDQSKNGYAGYIDGGASQEEFYKFIKPILEKMDGTEELLVKLNREDLLRKQRTFDNGSIPHQIHLGELHAILRRQEDFYPFLKDNREKIEKILTFRIPYYVGPLARGNSRFAWMTRKSEETITPWNFEEVVDKGASAQSFIERMTNFDKNLPNEKVLPKHSLLYEYFTVYNELTKVKYVTEGMRKPAFLSGEQKKAIVDLLFKTNRKVTVKQLKEDYFKKIECFDSVEISGVEDRFNASLGTYHDLLKIIKDKDFLDNEENEDILEDIVLTLTLFEDREMIEERLKTYAHLFDDKVMKQLKRRRYTGWGRLSRKLINGIRDKQSGKTILDFLKSDGFANRNFMQLIHDDSLTFKEDIQKAQVSGQGDSLHEHIANLAGSPAIKKGILQTVKVVDELVKVMGRHKPENIVIEMARENQTTQKGQKNSRERMKRIEEGIKELGSQILKEHPVENTQLQNEKLYLYYLQNGRDMYVDQELDINRLSDYDVDHIVPQSFLKDDSIDNKVLTRSDKNRGKSDNVPSEEVVKKMKNYWRQLLNAKLITQRKFDNLTKAERGGLSELDKAGFIKRQLVETRQITKHVAQILDSRMNTKYDENDKLIREVKVITLKSKLVSDFRKDFQFYKVREINNYHHAHDAYLNAVVGTALIKKYPKLESEFVYGDYKVYDVRKMIAKSEQEIGKATAKYFFYSNIMNFFKTEITLANGEIRKRPLIETNGETGEIVWDKGRDFATVRKVLSMPQVNIVKKTEVQTGGFSKESILPKRNSDKLIARKKDWDPKKYGGFDSPTVAYSVLVVAKVEKGKSKKLKSVKELLGITIMERSSFEKNPIDFLEAKGYKEVKKDLIIKLPKYSLFELENGRKRMLASAGELQKGNELALPSKYVNFLYLASHYEKLKGSPEDNEQKQLFVEQHKHYLDEIIEQISEFSKRVILADANLDKVLSAYNKHRDKPIREQAENIIHLFTLTNLGAPAAFKYFDTTIDRKRYTSTKEVLDATLIHQSITGLYETRIDLSQLGGDSGGSGGSGGSTNLSDIIEKETGKQLVIQESILMLPEEVEEVIGNKPESDILVHTAYDESTDENVMLLTSDAPEYKPWALVIQDSNGENKIKMLSGGSKRTADGSEFEPKKKRKV

SEQ ID NO: 539 - protein, 1699 aa, synthetic construct
MKRTADGSEFESPKKKRKVSSEVEFSHEYWMRHALTLAKRARDERAGPVGAVLVLNNRVIGEGWNRAIGLHDPTAHAEIMALRQGGLVMQNHRLIDATLYVTFEPCVMCAGAMINSRIGRVVFGVRNSKRGAAGSLMNVLNYPGMNHRVEITEGILADECAALLCDFYRMPRHVFNSQKKAQSSINSGGSSGGSSGSETPGTSESATPESSGGSSGGSDKKYSIGLAIGTNSVGWAVITDEYKVPSKKFKVLGNTDRHSIKKNLIGALLFDSGETAEATRLKRTARRRYTRRKNRICYLQEIFSNEMAKVDDSFFHRLEESFLVEEDKKHERHPIFGNIVDEVAYHEKYPTIYHLRKKLVDSTDKADLRLIYLALAHMIKFRGHFLIEGDLNPDNSDVDKLFIQLVQTYNQLFEENPINASGVDAKAILSARLSKSRRLENLIAQLPGEKKNGLFGNLIALSLGLTPNFKSNFDLAEDAKLQLSKDTYDDDLDNLLAQIGDQYADLFLAAKNLSDAILLSDILRVNTEITKAPLSASMIKRYDEHHQDLTLLKALVRQQLPEKYKEIFFDQSKNGYAGYIDGGASQEEFYKFIKPILEKMDGTEELLVKLNREDLLRKQRTFDNGSIPHQIHLGELHAILRRQEDFYPFLKDNREKIEKILTFRIPYYVGPLARGNSRFAWMTRKSEETITPWNFEEVVDKGASAQSFIERMTNFDKNLPNEKVLPKHSLLYEYFTVYNELTKVKYVTEGMRKPAFLSGEQKKAIVDLLFKTNRKVTVKQLKEDYFKKIECFDSVEISGVEDRFNASLGTYHDLLKIIKDKDFLDNEENEDILEDIVLTLTLFEDREMIEERLKTYAHLFDDKVMKQLKRRRYTGWGRLSRKLINGIRDKQSGKTILDFLKSDGFANRNFMQLIHDDSLTFKEDIQKAQVSGQGDSLHEHIANLAGSPAIKKGILQTVKVVDELVKVMGRHKPENIVIEMARENQTTQKGQKNSRERMKRIEEGIKELGSQILKEHPVENTQLQNEKLYLYYLQNGRDMYVDQELDINRLSDYDVDHIVPQSFLKDDSIDNKVLTRSDKNRGKSDNVPSEEVVKKMKNYWRQLLNAKLITQRKFDNLTKAERGGLSELDKAGFIKRQLVETRQITKHVAQILDSRMNTKYDENDKLIREVKVITLKSKLVSDFRKDFQFYKVREINNYHHAHDAYLNAVVGTALIKKYPKLESEFVYGDYKVYDVRKMIAKSEQEIGKATAKYFFYSNIMNFFKTEITLANGEIRKRPLIETNGETGEIVWDKGRDFATVRKVLSMPQVNIVKKTEVQTGGFSKESILPKRNSDKLIARKKDWDPKKYGGFDSPTVAYSVLVVAKVEKGKSKKLKSVKELLGITIMERSSFEKNPIDFLEAKGYKEVKKDLIIKLPKYSLFELENGRKRMLASAGELQKGNELALPSKYVNFLYLASHYEKLKGSPEDNEQKQLFVEQHKHYLDEIIEQISEFSKRVILADANLDKVLSAYNKHRDKPIREQAENIIHLFTLTNLGAPAAFKYFDTTIDRKRYTSTKEVLDATLIHQSITGLYETRIDLSQLGGDSGGSGGSGGSTNLSDIIEKETGKQLVIQESILMLPEEVEEVIGNKPESDILVHTAYDESTDENVMLLTSDAPEYKPWALVIQDSNGENKIKMLSGGSKRTADGSEFEPKKKRKV

SEQ ID NO: 540 - protein, 1699 aa, synthetic construct
MKRTADGSEFESPKKKRKVSSEVEFSHEYWMRHALTLAKRARDEGAGPVGAVLVLNNRVIGEGWNRAIGLHDPTAHAEIMALRQGGLVMQNYRLFDATLYVTFEPCVMCAGAMINSRIGRVVFGWRNSKRGAAGSLMNVLNYPGMNHRVEITEGILADECAALLCDFYRMPRQVFNSQKKAQSSINSGGSSGGSSGSETPGTSESATPESSGGSSGGSDKKYSIGLAIGTNSVGWAVITDEYKVPSKKFKVLGNTDRHSIKKNLIGALLFDSGETAEATRLKRTARRRYTRRKNRICYLQEIFSNEMAKVDDSFFHRLEESFLVEEDKKHERHPIFGNIVDEVAYHEKYPTIYHLRKKLVDSTDKADLRLIYLALAHMIKFRGHFLIEGDLNPDNSDVDKLFIQLVQTYNQLFEENPINASGVDAKAILSARLSKSRRLENLIAQLPGEKKNGLFGNLIALSLGLTPNFKSNFDLAEDAKLQLSKDTYDDDLDNLLAQIGDQYADLFLAAKNLSDAILLSDILRVNTEITKAPLSASMIKRYDEHHQDLTLLKALVRQQLPEKYKEIFFDQSKNGYAGYIDGGASQEEFYKFIKPILEKMDGTEELLVKLNREDLLRKQRTFDNGSIPHQIHLGELHAILRRQEDFYPFLKDNREKIEKILTFRIPYYVGPLARGNSRFAWMTRKSEETITPWNFEEVVDKGASAQSFIERMTNFDKNLPNEKVLPKHSLLYEYFTVYNELTKVKYVTEGMRKPAFLSGEQKKAIVDLLFKTNRKVTVKQLKEDYFKKIECFDSVEISGVEDRFNASLGTYHDLLKIIKDKDFLDNEENEDILEDIVLTLTLFEDREMIEERLKTYAHLFDDKVMKQLKRRRYTGWGRLSRKLINGIRDKQSGKTILDFLKSDGFANRNFMQLIHDDSLTFKEDIQKAQVSGQGDSLHEHIANLAGSPAIKKGILQTVKVVDELVKVMGRHKPENIVIEMARENQTTQKGQKNSRERMKRIEEGIKELGSQILKEHPVENTQLQNEKLYLYYLQNGRDMYVDQELDINRLSDYDVDHIVPQSFLKDDSIDNKVLTRSDKNRGKSDNVPSEEVVKKMKNYWRQLLNAKLITQRKFDNLTKAERGGLSELDKAGFIKRQLVETRQITKHVAQILDSRMNTKYDENDKLIREVKVITLKSKLVSDFRKDFQFYKVREINNYHHAHDAYLNAVVGTALIKKYPKLESEFVYGDYKVYDVRKMIAKSEQEIGKATAKYFFYSNIMNFFKTEITLANGEIRKRPLIETNGETGEIVWDKGRDFATVRKVLSMPQVNIVKKTEVQTGGFSKESILPKRNSDKLIARKKDWDPKKYGGFDSPTVAYSVLVVAKVEKGKSKKLKSVKELLGITIMERSSFEKNPIDFLEAKGYKEVKKDLIIKLPKYSLFELENGRKRMLASAGELQKGNELALPSKYVNFLYLASHYEKLKGSPEDNEQKQLFVEQHKHYLDEIIEQISEFSKRVILADANLDKVLSAYNKHRDKPIREQAENIIHLFTLTNLGAPAAFKYFDTTIDRKRYTSTKEVLDATLIHQSITGLYETRIDLSQLGGDSGGSGGSGGSTNLSDIIEKETGKQLVIQESILMLPEEVEEVIGNKPESDILVHTAYDESTDENVMLLTSDAPEYKPWALVIQDSNGENKIKMLSGGSKRTADGSEFEPKKKRKV

SEQ ID NO: 541 - protein, 1699 aa, synthetic construct
MKRTADGSEFESPKKKRKVSSEVEFSHEYWMRHALTLAKRARDERKAPVGAVLVLNNRVIGEGWNRAIGLHDPTAHAEIIALRQGGLVMQNYRLIDATLYVTFEPCVMCAGAMINSRIGRVVFGWRNSKRGAAGSLMNVLNYPGMNHRVEITEGILADECAALLCDFYRMPRQVFNAQKKAQSSINSGGSSGGSSGSETPGTSESATPESSGGSSGGSDKKYSIGLAIGTNSVGWAVITDEYKVPSKKFKVLGNTDRHSIKKNLIGALLFDSGETAEATRLKRTARRRYTRRKNRICYLQEIFSNEMAKVDDSFFHRLEESFLVEEDKKHERHPIFGNIVDEVAYHEKYPTIYHLRKKLVDSTDKADLRLIYLALAHMIKFRGHFLIEGDLNPDNSDVDKLFIQLVQTYNQLFEENPINASGVDAKAILSARLSKSRRLENLIAQLPGEKKNGLFGNLIALSLGLTPNFKSNFDLAEDAKLQLSKDTYDDDLDNLLAQIGDQYADLFLAAKNLSDAILLSDILRVNTEITKAPLSASMIKRYDEHHQDLTLLKALVRQQLPEKYKEIFFDQSKNGYAGYIDGGASQEEFYKFIKPILEKMDGTEELLVKLNREDLLRKQRTFDNGSIPHQIHLGELHAILRRQEDFYPFLKDNREKIEKILTFRIPYYVGPLARGNSRFAWMTRKSEETITPWNFEEVVDKGASAQSFIERMTNFDKNLPNEKVLPKHSLLYEYFTVYNELTKVKYVTEGMRKPAFLSGEQKKAIVDLLFKTNRKVTVKQLKEDYFKKIECFDSVEISGVEDRFNASLGTYHDLLKIIKDKDFLDNEENEDILEDIVLTLTLFEDREMIEERLKTYAHLFDDKVMKQLKRRRYTGWGRLSRKLINGIRDKQSGKTILDFLKSDGFANRNFMQLIHDDSLTFKEDIQKAQVSGQGDSLHEHIANLAGSPAIKKGILQTVKVVDELVKVMGRHKPENIVIEMARENQTTQKGQKNSRERMKRIEEGIKELGSQILKEHPVENTQLQNEKLYLYYLQNGRDMYVDQELDINRLSDYDVDHIVPQSFLKDDSIDNKVLTRSDKNRGKSDNVPSEEVVKKMKNYWRQLLNAKLITQRKFDNLTKAERGGLSELDKAGFIKRQLVETRQITKHVAQILDSRMNTKYDENDKLIREVKVITLKSKLVSDFRKDFQFYKVREINNYHHAHDAYLNAVVGTALIKKYPKLESEFVYGDYKVYDVRKMIAKSEQEIGKATAKYFFYSNIMNFFKTEITLANGEIRKRPLIETNGETGEIVWDKGRDFATVRKVLSMPQVNIVKKTEVQTGGFSKESILPKRNSDKLIARKKDWDPKKYGGFDSPTVAYSVLVVAKVEKGKSKKLKSVKELLGITIMERSSFEKNPIDFLEAKGYKEVKKDLIIKLPKYSLFELENGRKRMLASAGELQKGNELALPSKYVNFLYLASHYEKLKGSPEDNEQKQLFVEQHKHYLDEIIEQISEFSKRVILADANLDKVLSAYNKHRDKPIREQAENIIHLFTLTNLGAPAAFKYFDTTIDRKRYTSTKEVLDATLIHQSITGLYETRIDLSQLGGDSGGSGGSGGSTNLSDIIEKETGKQLVIQESILMLPEEVEEVIGNKPESDILVHTAYDESTDENVMLLTSDAPEYKPWALVIQDSNGENKIKMLSGGSKRTADGSEFEPKKKRKV

SEQ ID NO: 542 - protein, 1699 aa, synthetic construct
MKRTADGSEFESPKKKRKVSSEVEFSHEYWMRHALTLAKRARDEGEAPVGAVLVLNNRVIGEGWNRRIGLHDPTAHAEIMALRQGGLVMQNSRLIDATLYVTFEPCVMCAGAMINSRIGRVVFGVRNSKRGAAGSLMNVLNYPGMNHRVEITEGILADECAALLCDFYRMPRQVFNAQKKAQSSINSGGSSGGSSGSETPGTSESATPESSGGSSGGSDKKYSIGLAIGTNSVGWAVITDEYKVPSKKFKVLGNTDRHSIKKNLIGALLFDSGETAEATRLKRTARRRYTRRKNRICYLQEIFSNEMAKVDDSFFHRLEESFLVEEDKKHERHPIFGNIVDEVAYHEKYPTIYHLRKKLVDSTDKADLRLIYLALAHMIKFRGHFLIEGDLNPDNSDVDKLFIQLVQTYNQLFEENPINASGVDAKAILSARLSKSRRLENLIAQLPGEKKNGLFGNLIALSLGLTPNFKSNFDLAEDAKLQLSKDTYDDDLDNLLAQIGDQYADLFLAAKNLSDAILLSDILRVNTEITKAPLSASMIKRYDEHHQDLTLLKALVRQQLPEKYKEIFFDQSKNGYAGYIDGGASQEEFYKFIKPILEKMDGTEELLVKLNREDLLRKQRTFDNGSIPHQIHLGELHAILRRQEDFYPFLKDNREKIEKILTFRIPYYVGPLARGNSRFAWMTRKSEETITPWNFEEVVDKGASAQSFIERMTNFDKNLPNEKVLPKHSLLYEYFTVYNELTKVKYVTEGMRKPAFLSGEQKKAIVDLLFKTNRKVTVKQLKEDYFKKIECFDSVEISGVEDRFNASLGTYHDLLKIIKDKDFLDNEENEDILEDIVLTLTLFEDREMIEERLKTYAHLFDDKVMKQLKRRRYTGWGRLSRKLINGIRDKQSGKTILDFLKSDGFANRNFMQLIHDDSLTFKEDIQKAQVSGQGDSLHEHIANLAGSPAIKKGILQTVKVVDELVKVMGRHKPENIVIEMARENQTTQKGQKNSRERMKRIEEGIKELGSQILKEHPVENTQLQNEKLYLYYLQNGRDMYVDQELDINRLSDYDVDHIVPQSFLKDDSIDNKVLTRSDKNRGKSDNVPSEEVVKKMKNYWRQLLNAKLITQRKFDNLTKAERGGLSELDKAGFIKRQLVETRQITKHVAQILDSRMNTKYDENDKLIREVKVITLKSKLVSDFRKDFQFYKVREINNYHHAHDAYLNAVVGTALIKKYPKLESEFVYGDYKVYDVRKMIAKSEQEIGKATAKYFFYSNIMNFFKTEITLANGEIRKRPLIETNGETGEIVWDKGRDFATVRKVLSMPQVNIVKKTEVQTGGFSKESILPKRNSDKLIARKKDWDPKKYGGFDSPTVAYSVLVVAKVEKGKSKKLKSVKELLGITIMERSSFEKNPIDFLEAKGYKEVKKDLIIKLPKYSLFELENGRKRMLASAGELQKGNELALPSKYVNFLYLASHYEKLKGSPEDNEQKQLFVEQHKHYLDEIIEQISEFSKRVILADANLDKVLSAYNKHRDKPIREQAENIIHLFTLTNLGAPAAFKYFDTTIDRKRYTSTKEVLDATLIHQSITGLYETRIDLSQLGGDSGGSGGSGGSTNLSDIIEKETGKQLVIQESILMLPEEVEEVIGNKPESDILVHTAYDESTDENVMLLTSDAPEYKPWALVIQDSNGENKIKMLSGGSKRTADGSEFEPKKKRKV

SEQ ID NO: 543 - protein, 1699 aa, synthetic construct
MKRTADGSEFESPKKKRKVSSEVEFSHEYWMRHALTLAKRARDEGEGPVGAVLVLNNRVIGEGWNRRIGLHDPTAHAEIMALRQGGLVMQNCKLIDATLYVTFEPCVMCAGAMIHSRIGRVVFGVRNSKRGAAGSLMNVLNYPGMNHRVEITEGILADECAALLCDFYRMPRQVFNAQKKAQSSINSGGSSGGSSGSETPGTSESATPESSGGSSGGSDKKYSIGLAIGTNSVGWAVITDEYKVPSKKFKVLGNTDRHSIKKNLIGALLFDSGETAEATRLKRTARRRYTRRKNRICYLQEIFSNEMAKVDDSFFHRLEESFLVEEDKKHERHPIFGNIVDEVAYHEKYPTIYHLRKKLVDSTDKADLRLIYLALAHMIKFRGHFLIEGDLNPDNSDVDKLFIQLVQTYNQLFEENPINASGVDAKAILSARLSKSRRLENLIAQLPGEKKNGLFGNLIALSLGLTPNFKSNFDLAEDAKLQLSKDTYDDDLDNLLAQIGDQYADLFLAAKNLSDAILLSDILRVNTEITKAPLSASMIKRYDEHHQDLTLLKALVRQQLPEKYKEIFFDQSKNGYAGYIDGGASQEEFYKFIKPILEKMDGTEELLVKLNREDLLRKQRTFDNGSIPHQIHLGELHAILRRQEDFYPFLKDNREKIEKILTFRIPYYVGPLARGNSRFAWMTRKSEETITPWNFEEVVDKGASAQSFIERMTNFDKNLPNEKVLPKHSLLYEYFTVYNELTKVKYVTEGMRKPAFLSGEQKKAIVDLLFKTNRKVTVKQLKEDYFKKIECFDSVEISGVEDRFNASLGTYHDLLKIIKDKDFLDNEENEDILEDIVLTLTLFEDREMIEERLKTYAHLFDDKVMKQLKRRRYTGWGRLSRKLINGIRDKQSGKTILDFLKSDGFANRNFMQLIHDDSLTFKEDIQKAQVSGQGDSLHEHIANLAGSPAIKKGILQTVKVVDELVKVMGRHKPENIVIEMARENQTTQKGQKNSRERMKRIEEGIKELGSQILKEHPVENTQLQNEKLYLYYLQNGRDMYVDQELDINRLSDYDVDHIVPQSFLKDDSIDNKVLTRSDKNRGKSDNVPSEEVVKKMKNYWRQLLNAKLITQRKFDNLTKAERGGLSELDKAGFIKRQLVETRQITKHVAQILDSRMNTKYDENDKLIREVKVITLKSKLVSDFRKDFQFYKVREINNYHHAHDAYLNAVVGTALIKKYPKLESEFVYGDYKVYDVRKMIAKSEQEIGKATAKYFFYSNIMNFFKTEITLANGEIRKRPLIETNGETGEIVWDKGRDFATVRKVLSMPQVNIVKKTEVQTGGFSKESILPKRNSDKLIARKKDWDPKKYGGFDSPTVAYSVLVVAKVEKGKSKKLKSVKELLGITIMERSSFEKNPIDFLEAKGYKEVKKDLIIKLPKYSLFELENGRKRMLASAGELQKGNELALPSKYVNFLYLASHYEKLKGSPEDNEQKQLFVEQHKHYLDEIIEQISEFSKRVILADANLDKVLSAYNKHRDKPIREQAENIIHLFTLTNLGAPAAFKYFDTTIDRKRYTSTKEVLDATLIHQSITGLYETRIDLSQLGGDSGGSGGSGGSTNLSDIIEKETGKQLVIQESILMLPEEVEEVIGNKPESDILVHTAYDESTDENVMLLTSDAPEYKPWALVIQDSNGENKIKMLSGGSKRTADGSEFEPKKKRKV

SEQ ID NO: 544 - protein, 1505 aa, synthetic construct
MKRTADGSEFESPKKKRKVSSEVEFSHEYWMRHALTLAKRARDEGAGPVGAVLVLNNRVIGEGWNRAIGLHDPTAHAEIMALRQGGLVMQNYRLFDATLYVTFEPCVMCAGAMINSRIGRVVFGVRNSKRGAAGSLMNVLNYPGMNHRVEITEGILADECAALLCDFYRMPRQVFNSQKKAQSSINSGGSSGGSSGSETPGTSESATPESSGGSSGGSAAFKPNPINYILGLAIGIASVGWAMVEIDEEGNPIRLIDLGVRVFERAEVPKTGDSLAMARRLARSVRRLTRRRAHRLLRARRLLKREGVLQAADFDENGLITSLPNTPWQLRAAALDRKLTPLEWSAVLLHLIKHRGYLSQRKNEGETAAKELGALLKGVANNAHALQTGDFRTPAELALNKFEKESGHIRNQRGDYSHTFSRKDLQAELILLFEKQKEFGNPHVSGGLKEGIETLLMTQRPALSGDAVQKMLGHCTLEPTEPKAAKNTYTAERFIWLTKLNNLRILEQGSERPLTDTERSTLMDEPYRKSKLTYAQARKLLGLEDTAFFKGLRYGKDNAEASTLMEMKAYHAISRALEKEGLKDKKSPLNLSSELQDEIGTAFSLFKTDEDITGRLKDRVQPEILEALLKHISFDKFVQISLKALRRIVPLMEQGKRYDEACAEIYGVHYGKKNTEEKIYLPPIPADEIRNPVVLRALSQARKVINGVVRRYGSPARIHIETAREVGKSFKDRKEIAKRQEENRKDREKAAAKFREYFPNFVGEPKSKDILKLRLYEQQHGKCLYSGKEINLVRLNEKGYVEIDHALPFSRTWDDSFNNKVLVLGSENQNKGNQTPYEYFNGKDNSREWQEFKARVETSRFPSSKKQRILLQKFDEDGFKECNLNDTRYVNRFLCQFVADHILLTGKGKRRVVASNGQITNLLRGFWRLRKVRAENDRHHALDAVVVACSTVAMQQKITRFVRYKEMNAFDGKTVDKETGKVLYQKTHFPQPWEFFAQEVMIRVFGKPDGKPEFEEADTPEKLRTLLAEKLSSRPEAVHEYVTPLFVSRAPNRKMSGAHKDTLRSAKRFVKHNEKISVKRVWLTEIKLADLENMVNYKNGREIELYEALKARLEAYGGNAKQAFDPKDNPFYKKGGQLVKAVRVEKTQKSGVLLNKKNAYTIADNGDMVRVDVFCKVDKKGKNQYFIVPIYAWQVAENILPDIDCKGYRIDDSYTFCFSLHKYDLIAFQKDEKSKVEFAYYINCDSSSGGFYLAWHDKGSREQRFRISTQNLALIQKYQVNELGKEIRPCRLKKRPPVSGGSGGSGGSTNLSDIIEKETGKQLVIQESILMLPEEVEEVIGNKPESDILVHTAYDESTDENVMLLTSDAPEYKPWALVIQDSNGENKIKMLSGGSGGSGGSTNLSDIIEKETGKQLVIQESILMLPEEVEEVIGNKPESDILVHTAYDESTDENVMLLTSDAPEYKPWALVIQDSNGENKIKMLSGGSKRTADGSEFEPKKKRKV

SEQ ID NO: 545 - protein, 1478 aa, synthetic construct
MKRTADGSEFESPKKKRKVSSEVEFSHEYWMRHALTLAKRARDEGAGPVGAVLVLNNRVIGEGWNRAIGLHDPTAHAEIMALRQGGLVMQNYRLFDATLYVTFEPCVMCAGAMINSRIGRVVFGVRNSKRGAAGSLMNVLNYPGMNHRVEITEGILADECAALLCDFYRMPRQVFNSQKKAQSSINSGGSSGGSSGSETPGTSESATPESSGGSSGGSGKRNYILGLAIGITSVGYGIIDYETRDVIDAGVRLFKEANVENNEGRRSKRGARRLKRRRRHRIQRVKKLLFDYNLLTDHSELSGINPYEARVKGLSQKLSEEEFSAALLHLAKRRGVHNVNEVEEDTGNELSTKEQISRNSKALEEKYVAELQLERLKKDGEVRGSINRFKTSDYVKEAKQLLKVQKAYHQLDQSFIDTYIDLLETRRTYYEGPGEGSPFGWKDIKEWYEMLMGHCTYFPEELRSVKYAYNADLYNALNDLNNLVITRDENEKLEYYEKFQIIENVFKQKKKPTLKQIAKEILVNEEDIKGYRVTSTGKPEFTNLKVYHDIKDITARKEIIENAELLDQIAKILTIYQSSEDIQEELTNLNSELTQEEIEQISNLKGYTGTHNLSLKAINLILDELWHTNDNQIAIFNRLKLVPKKVDLSQQKEIPTTLVDDFILSPVVKRSFIQSIKVINAIIKKYGLPNDIIIELAREKNSKDAQKMINEMQKRNRQTNERIEEIIRTTGKENAKYLIEKIKLHDMQEGKCLYSLEAIPLEDLLNNPFNYEVDHIIPRSVSFDNSFNNKVLVKQEENSKKGNRTPFQYLSSSDSKISYETFKKHILNLAKGKGRISKTKKEYLLEERDINRFSVQKDFINRNLVDTRYATRGLMNLLRSYFRVNNLDVKVKSINGGFTSFLRRKWKFKKERNKGYKHHAEDALIIANADFIFKEWKKLDKAKKVMENQMFEEKQAESMPEIETEQEYKEIFITPHQIKHIKDFKDYKYSHRVDKKPNRELINDTLYSTRKDDKGNTLIVNNLNGLYDKDNDKLKKLINKSPEKLLMYHHDPQTYQKLKLIMEQYGDEKNPLYKYYEETGNYLTKYSKKDNGPVIKKIKYYGNKLNAHLDITDDYPNSRNKVVKLSLKPYRFDVYLDNGVYKFVTVKNLDVIKKENYYEVNSKCYEEAKKLKKISNQAEFIASFYNNDLIKINGELYRVIGVNNDLLNRIEVNMIDITYREYLENMNDKRPPRIIKTIASKTQSIKKYSTDILGNLYEVKSKKHPQIIKKGSGGSGGSGGSTNLSDIIEKETGKQLVIQESILMLPEEVEEVIGNKPESDILVHTAYDESTDENVMLLTSDAPEYKPWALVIQDSNGENKIKMLSGGSGGSGGSTNLSDIIEKETGKQLVIQESILMLPEEVEEVIGNKPESDILVHTAYDESTDENVMLLTSDAPEYKPWALVIQDSNGENKIKMLSGGSKRTADGSEFEPKKKRKV

SEQ ID NO: 546 - protein, 1792 aa, synthetic construct
MKRTADGSEFESPKKKRKVSSEVEFSHEYWMRHALTLAKRARDEGAGPVGAVLVLNNRVIGEGWNRAIGLHDPTAHAEIMALRQGGLVMQNYRLFDATLYVTFEPCVMCAGAMINSRIGRVVFGVRNSKRGAAGSLMNVLNYPGMNHRVEITEGILADECAALLCDFYRMPRQVFNSQKKAQSSINSGGSSGGSSGSETPGTSESATPESSGGSSGGSDKKYSIGLAIGTNSVGWAVITDEYKVPSKKFKVLGNTDRHSIKKNLIGALLFDSGETAEATRLKRTARRRYTRRKNRICYLQEIFSNEMAKVDDSFFHRLEESFLVEEDKKHERHPIFGNIVDEVAYHEKYPTIYHLRKKLVDSTDKADLRLIYLALAHMIKFRGHFLIEGDLNPDNSDVDKLFIQLVQTYNQLFEENPINASGVDAKAILSARLSKSRRLENLIAQLPGEKKNGLFGNLIALSLGLTPNFKSNFDLAEDAKLQLSKDTYDDDLDNLLAQIGDQYADLFLAAKNLSDAILLSDILRVNTEITKAPLSASMIKRYDEHHQDLTLLKALVRQQLPEKYKEIFFDQSKNGYAGYIDGGASQEEFYKFIKPILEKMDGTEELLVKLNREDLLRKQRTFDNGSIPHQIHLGELHAILRRQEDFYPFLKDNREKIEKILTFRIPYYVGPLARGNSRFAWMTRKSEETITPWNFEEVVDKGASAQSFIERMTNFDKNLPNEKVLPKHSLLYEYFTVYNELTKVKYVTEGMRKPAFLSGEQKKAIVDLLFKTNRKVTVKQLKEDYFKKIECFDSVEISGVEDRFNASLGTYHDLLKIIKDKDFLDNEENEDILEDIVLTLTLFEDREMIEERLKTYAHLFDDKVMKQLKRRRYTGWGRLSRKLINGIRDKQSGKTILDFLKSDGFANRNFMQLIHDDSLTFKEDIQKAQVSGQGDSLHEHIANLAGSPAIKKGILQTVKVVDELVKVMGRHKPENIVIEMARENQTTQKGQKNSRERMKRIEEGIKELGSQILKEHPVENTQLQNEKLYLYYLQNGRDMYVDQELDINRLSDYDVDHIVPQSFLKDDSIDNKVLTRSDKNRGKSDNVPSEEVVKKMKNYWRQLLNAKLITQRKFDNLTKAERGGLSELDKAGFIKRQLVETRQITKHVAQILDSRMNTKYDENDKLIREVKVITLKSKLVSDFRKDFQFYKVREINNYHHAHDAYLNAVVGTALIKKYPKLESEFVYGDYKVYDVRKMIAKSEQEIGKATAKYFFYSNIMNFFKTEITLANGEIRKRPLIETNGETGEIVWDKGRDFATVRKVLSMPQVNIVKKTEVQTGGFSKESIRPKRNSDKLIARKKDWDPKKYGGFVSPTVAYSVLVVAKVEKGKSKKLKSVKELLGITIMERSSFEKNPIDFLEAKGYKEVKKDLIIKLPKYSLFELENGRKRMLASARFLQKGNELALPSKYVNFLYLASHYEKLKGSPEDNEQKQLFVEQHKHYLDEIIEQISEFSKRVILADANLDKVLSAYNKHRDKPIREQAENIIHLFTLTNLGAPRAFKYFDTTIDRKVYRSTKEVLDATLIHQSITGLYETRIDLSQLGGDSGGSGGSGGSTNLSDIIEKETGKQLVIQESILMLPEEVEEVIGNKPESDILVHTAYDESTDENVMLLTSDAPEYKPWALVIQDSNGENKIKMLSGGSGGSGGSTNLSDIIEKETGKQLVIQESILMLPEEVEEVIGNKPESDILVHTAYDESTDENVMLLTSDAPEYKPWALVIQDSNGENKIKMLSGGSKRTADGSEFEPKKKRKV

SEQ ID NO: 547 - protein, 1315 aa, synthetic construct
MKRTADGSEFESPKKKRKVSSEVEFSHEYWMRHALTLAKRARDEGAGPVGAVLVLNNRVIGEGWNRAIGLHDPTAHAEIMALRQGGLVMQNYRLFDATLYVTFEPCVMCAGAMINSRIGRVVFGVRNSKRGAAGSLMNVLNYPGMNHRVEITEGILADECAALLCDFYRMPRQVFNSQKKAQSSINSGGSSGGSSGSETPGTSESATPESSGGSSGGSARILAFAIGISSIGWAFSENDELKDCGVRIFTKVENPKTGESLALPRRLARSARKRYARRKARLNHLKHLIANEFKLNYEDYQSFDESLAKAYKGSLISPYELRFRALNELLSKQDFARVILHIAKRRGYDDIKNSDDKEKGAILKAIKQNEEKLANYQSVGEYLYKEYFQKFKENSKEFTNVRNKKESYERCIAQSFLKDELKLIFKKQREFGFSFSKKFEEEVLSVAFYKRALKDFSHLVGNCSFFTDEKRAPKNSPLAFMFVALTRIINLLNNLKNTEGILYTKDDLNALLNEVLKNGTLTYKQTKKLLGLSDDYEFKGEKGTYFIEFKKYKEFIKALGEHNLSQDDLNEIAKDITLIKDEIKLKKALAKYDLNQNQIDSLSKLEFKDHLNISFKALKLVTPLMLEGKKYDEACNELNLKVAINEDKKDFLPAFNETYYKDEVTNPVVLRAIKEYRKVLNALLKKYGKVHKINIELAREVGKNHSQRAKIEKEQNENYKAKKDAELECEKLGLKINSKNILKLRLFKEQKEFCAYSGEKIKISDLQDEKMLEIDHIYPYSRSFDDSYMNKVLVFTKQNQEKLNQTPFEAFGNDSAKWQKIEVLAKNLPTKKQKRILDKNYKDKEQKNFKDRNLNDTRYIARLVLNYTKDYLDFLPLSDDENTKLNDTQKGSKVHVEAKSGMLTSALRHTWGFSAKDRNNHLHHAIDAVIIAYANNSIVKAFSDFKKEQESNSAELYAKKISELDYKNKRKFFEPFSGFRQKVLDKIDEIFVSKPERKKPSGALHEETFRKEEEFYQSYGGKEGVLKALELGKIRKVNGKIVKNGDMFRVDIFKHKKTNKFYAVPIYTMDFALKVLPNKAVARSKKGEIKDWILMDENYEFCFSLYKDSLILIQTKKMQEPEFVYYNAFTSSTVSLIVSKHDNKFETLSKNQKILFKNANEKEVIAKSIGIQNLKVFEKYIVSALGEVTKAEFRQREDFKKSGGSGGSGGSTNLSDIIEKETGKQLVIQESILMLPEEVEEVIGNKPESDILVHTAYDESTDENVMLLTSDAPEYKPWALVIQDSNGENKIKMLSGGSKRTADGSEFEPKKKRKV

SEQ ID NO: 548 - DNA, 7917 bp, synthetic construct
  source 1..7917: mol_type = other DNA
tagttattaatagtaatcaattacggggtcattagttcatagcccatatatggagttccgcgttacataacttacggtaaatggcccgcctggctgaccgcccaacgacccccgcccattgacgtcaataatgacgtatgttcccatagtaacgccaatagggactttccattgacgtcaatgggtggagtatttacggtaaactgcccacttggcagtacatcaagtgtatcatatgccaagtacgccccctattgacgtcaatgacggtaaatggcccgcctggcattatgcccagtacatgaccttatgggactttcctacttggcagtacatctacgtattagtcatcgctattaccatggtgatgcggttttggcagtacatcaatgggcgtggatagcggtttgactcacggggatttccaagtctccaccccattgacgtcaatgggagtttgttttggcaccaaaatcaacgggactttccaaaatgtcgtaacaactccgccccattgacgcaaatgggcggtaggcgtgtacggtgggaggtctatataagcagagctggtttagtgaaccgtcagatccgctagagatccgcggccgctaatacgactcactatagggagagccgccaccatgaaacggacagccgacggaagcgagttcgagtcaccaaagaagaagcggaaagtcagttctgaggtggagttttcccacgagtactggatgagacatgccctgaccctggccaagagggcacgggatgagggggcgggtcctgtgggagccgtgctggtgctgaacaatagagtgatcggcgagggctggaacagagccatcggcctgcacgacccaacagcccatgccgaaattatggccctgagacagggcggcctggtcatgcagaactacagactgtttgacgccaccctgtacgtgacattcgagccttgcgtgatgtgcgccggcgccatgatcaactctaggatcggccgcgtggtgtttggcgtgaggaactcaaaaagaggcgccgcaggctccctgatgaacgtgctgaactaccccggcatgaatcaccgcgtcgaaattaccgagggaatcctggcagatgaatgtgccgccctgctgtgcgatttctatcggatgcctagacaggtgttcaattctcagaagaaggcccagagctccatcaactctggcggatctagcggaggatcctctggcagcgagacaccaggaacaagcgagtcagcaacaccagagagcagtggcggcagcagcggcggcagcgcagcattcaagcctaacccaatcaattacatcctgggactggcaatcggaatcgcatccgtgggatgggctatggtggagatcgacgaggaggggaatcctatccggctgatcgatctgggcgtgagagtgtttgagagggccgaggtgccaaagaccggcgattctctggctatggcccggagactggcacggagcgtgaggcgcctgacacggagaagggcacacaggctgctgagggcacgccggctgctgaagagagagggcgtgctgcaggcagcagacttcgatgagaatggcctgatcacgagcttgccaaacaccccctggcagctgagagcagccgccctggacaggaagctgacaccactggagtggtctgccgtgctgctgcacctgatcaagcaccgcggctacctgagccagcggaagaacgagggagagacagcagccaaggagctgggcgccctgctgaagggagtggccaacaatgcccacgccctgcagaccggcgatttcaggacacctgccgagctggccctgaataagtttgagaaggagtccggccacatcagaaaccagaggggcgactatagccacaccttctcccgcaaggatctgcaggccgagctgatcctgctgttcgagaagcagaaggagtttggcaatccacacgtgagcggaggcctgaaggagggaatcgagaccctgctgatgacacagaggcctgccctgtccggcgacgcagtgcagaagatgctggggcactgcaccctcgagcctacagagccaaaggccgccaagaacacctacacagccgagcggtttatctggctgacaaagctgaacaatctgagaatcctggagcagggatccgagaggccactgaccgacacagagaggtccaccctgatggatgagccttaccggaagtctaaactgacatatgcccaggccagaaagctgctgggcctggaggacaccgccttctttaagggcctgagatacggcaaggataatgccgaggcctccacactgatggagatgaaggcctatcacgccatctctcgcgccctggagaaggagggcctgaaggacaagaagtcccccctgaacctgagctccgagctgcaggatgagatcggcaccgccttctctctgtttaagaccgacgaggatatcacaggccgcctgaaggacagggtgcagcctgagatcctggaggccctgctgaagcacatctctttcgataagtttgtgcagatcagcctgaaggccctgagaaggatcgtgccactgatggagcagggcaagcggtacgacgaggcctgcgccgagatctacggcgttcactatggcaagaagaacacagaggagaagatctatctgccccctatccctgccgacgagatcagaaatcctgtggtgctgagggccctgtcccaggcaagaaaagtgatcaacggagtggtgcgccggtacggatctccagcccggatccacatcgagaccgccagagaagtgggcaagagcttcaaggaccggaaggagatcgcgaagagacaggaggagaatcgcaaggatcgggagaaggccgccgccaagtttagggagtacttccctaactttgtgggcgagccaaagtctaaggacatcctgaagctgcgcctgtacgagcagcagcacggcaagtgtctgtatagcggcaaagagatcaatctggtgcggctgaacgagaagggctatgtggagatcgatcacgccctgcctttctccagaacctgggacgattcttttaacaataaggtgctggtgctgggcagcgagaaccagaataagggcaatcagacaccatacgagtatttcaatggcaaggacaactccagggagtggcaggagttcaaggcccgcgtggagacctctagatttcccagtagcaagaagcagcggatcctgctgcagaagttcgacgaggatggctttaaggagtgcaacctgaatgacaccagatacgtgaaccggttcctgtgccagtttgtggccgatcacatcctgctgaccggcaagggcaagagaagggtggtcgcctctaatggccagatcacaaacctgctgagggggttttggagactgaggaaggtgcgggcagagaatgacagacaccacgcactggatgcagtggtggtggcatgcagcaccgtggcaatgcagcagaagatcacaagattcgtgaggtataaggagatgaacgcctttgacggcaagaccgtcgataaggagacaggcaaggtgctgtaccagaagacccacttcccccagccttgggagttctttgcccaggaagttatgatccgggtgttcggcaagccagacggcaagcctgagtttgaggaggccgataccccagagaagctgaggacactgctggcagagaagctgtctagcaggccagaggcagtgcacgagtacgtgaccccgctgttcgtgtccagggcacccaatcggaagatgtctggcgcccacaaggacacactgagaagcgccaagaggtttgtgaagcacaacgagaagatctccgtgaagagagtgtggctgaccgagatcaagctggccgatctggagaacatggtgaattacaagaacggcagggagatcgagctgtatgaggccctgaaggcaaggctggaggcctacggaggaaatgccaagcaggccttcgacccaaaggataaccccttttataagaagggaggacagctggtgaaggccgtgcgggtggagaagacccagaaaagcggcgtgctgctgaataagaagaacgcctacacaatcgccgacaatggtgatatggtgagagtggacgtgttctgtaaggtggataagaagggcaagaatcagtactttatcgtgcctatctatgcctggcaggtggccgagaacatcctgccagacatcgattgcaagggctacagaatcgacgatagctatacattctgtttttccctgcacaagtatgacctgatcgccttccagaaggatgagaagtccaaggtggagtttgcctactatatcaattgcgactcctctagcggcgggttctacctggcctggcacgataagggcagcagggagcagcggtttcgcatctccacccagaatctggcgctgatccagaagtatcaggtgaacgagctgggcaaggagatcaggccatgtcggctgaagaagcgcccacccgtgagcggcgggagcggcgggagcggggggagcactaatctgagcgacatcattgagaaggagactgggaaacagctggtcattcaggagtccatcctgatgctgcctgaggaggtggaggaagtgatcggcaacaagccagagtctgacatcctggtgcacaccgcctacgacgagtccacagatgagaatgtgatgctgctgacctctgacgcccccgagtataagccttgggccctggtcatccaggattctaacggcgagaataagatcaagatgctgagcggaggatccggaggatctggaggcagcaccaacctgtctgacatcatcgagaaggagacaggcaagcagctggtcatccaggagagcatcctgatgctgcccgaagaagtcgaagaagtgatcggaaacaagcctgagagcgatatcctggtccataccgcctacgacgagagtaccgacgaaaatgtgatgctgctgacatccgacgccccagagtataagccctgggctctggtcatccaggattccaacggagagaacaaaatcaaaatgctgtctggcggctcaaaaagaaccgccgacggcagcgaattcgagcccaagaagaagaggaaagtctaaccggtcatcatcaccatcaccattgagtttaaacccgctgatcagcctcgactgtgccttctagttgccagccatctgttgtttgcccctcccccgtgccttccttgaccctggaaggtgccactcccactgtcctttcctaataaaatgaggaaattgcatcgcattgtctgagtaggtgtcattctattctggggggtggggtggggcaggacagcaagggggaggattgggaagacaatagcaggcatgctggggatgcggtgggctctatggcttctgaggcggaaagaaccagctggggctcgataccgtcgacctctagctagagcttggcgtaatcatggtcatagctgtttcctgtgtgaaattgttatccgctcacaattccacacaacatacgagccggaagcataaagtgtaaagcctagggtgcctaatgagtgagctaactcacattaattgcgttgcgctcactgcccgctttccagtcgggaaacctgtcgtgccagctgcattaatgaatcggccaacgcgcggggagaggcggtttgcgtattgggcgcacttccgcttcctcgctcactgactcgctgcgctcggtcgttcggctgcggcgagcggtatcagctcactcaaaggcggtaatacggttatccacagaatcaggggataacgcaggaaagaacatgtgagcaaaaggccagcaaaaggccaggaaccgtaaaaaggccgcgttgctggcgtttttccataggctccgcccccctgacgagcatcacaaaaatcgacgctcaagtcagaggtggcgaaacccgacaggactataaagataccaggcgtttccccctggaagctccctcgtgcgctctcctgttccgaccctgccgcttaccggatacctgtccgcctttctcccttcgggaagcgtggcgctttctcatagctcacgctgtaggtatctcagttcggtgtaggtcgttcgctccaagctgggctgtgtgcacgaaccccccgttcagcccgaccgctgcgccttatccggtaactatcgtcttgagtccaacccggtaagacacgacttatcgccactggcagcagccactggtaacaggattagcagagcgaggtatgtaggcggtgctacagagttcttgaagtggtggcctaactacggctacactagaagaacagtatttggtatctgcgctctgctgaagccagttaccttcggaaaaagagttggtagctcttgatccggcaaacaaaccaccgctggtagcggtggtttttttgtttgcaagcagcagattacgcgcagaaaaaaaggatctcaagaagatcctttgatcttttctacggggtctgacactcagtggaacgaaaactcacgttaagggattttggtcatgagattatcaaaaaggatcttcacctagatccttttaaattaaaaatgaagttttaaatcaatctaaagtatatatgagtaaacttggtctgacagttaccaatgcttaatcagtgaggcacctatctcagcgatctgtctatttcgttcatccatagttgcctgactccccgtcgtgtagataactacgatacgggagggcttaccatctggccccagtgctgcaatgataccgcgggacccacgctcaccggctccagatttatcagcaataaaccagccagccggaagggccgagcgcagaagtggtcctgcaactttatccgcctccatccagtctattaattgttgccgggaagctagagtaagtagttcgccagttaatagtttgcgcaacgttgttgccattgctacaggcatcgtggtgtcacgctcgtcgtttggtatggcttcattcagctccggttcccaacgatcaaggcgagttacatgatcccccatgttgtgcaaaaaagcggttagctccttcggtcctccgatcgttgtcagaagtaagttggccgcagtgttatcactcatggttatggcagcactgcataattctcttactgtcatgccatccgtaagatgcttttctgtgactggtgagtactcaaccaagtcattctgagaatagtgtatgcggcgaccgagttgctcttgcccggcgtcaatacgggataataccgcgccacatagcagaactttaaaagtgctcatcattggaaaacgttcttcggggcgaaaactctcaaggatcttaccgctgttgagatccagttcgatgtaacccactcgtgcacccaactgatcttcagcatcttttactttcaccagcgtttctgggtgagcaaaaacaggaaggcaaaatgccgcaaaaaagggaataagggcgacacggaaatgttgaatactcatactcttcctttttcaatattattgaagcatttatcagggttattgtctcatgagcggatacatatttgaatgtatttagaaaaataaacaaataggggttccgcgcacatttccccgaaaagtgccacctgacgtcgacggatcgggagatcgatctcccgatcccctagggtcgactctcagtacaatctgctctgatgccgcatagttaagccagtatctgctccctgcttgtgtgttggaggtcgctgagtagtgcgcgagcaaaatttaagctacaacaaggcaaggcttgaccgacaattgcatgaagaatctgcttagggttaggcgttttgcgctgcttcgcgatgtacgggccagatatacgcgttgacattgattattgac

SEQ ID NO: 549 - DNA, 7347 bp, synthetic construct
  source 1..7347: mol_type = other DNA
attgatgcagtaatcatagcctacgctaacaacagcatcgtgaaagccttctccgatttcaagaaagaacaggagtctaatagcgccgagttgtacgccaagaaaatttccgaattggactataaaaataagagaaaattcttcgaacccttctccgggtttcgccaaaaggtcttagataagatcgacgagattttcgtttccaagcccgaaagaaaaaagccttcaggggcactgcacgaagagacattccgcaaggaagaggaattttaccaatcttacggtggtaaagagggagttctgaaggctctggagcttgggaagatccgcaaggtaaacgggaaaatcgtgaaaaacggggacatgttcagggtggatatcttcaagcacaaaaagaccaacaagttctacgcagtacccatctacactatggatttcgctttaaaggttctcccaaataaggcggtggctcgatcgaagaaaggagagatcaaggactggatcttaatggatgaaaattacgagttttgcttctcgctctacaaagatagcctgattctgatccagacaaaaaagatgcaggaaccagaatttgtttattataacgccttcacgagcagtacagtgtccctgattgtgagcaagcatgataacaagttcgagactctgtctaagaatcagaaaatccttttcaagaacgccaacgagaaggaggtcatcgcaaagtcaattggcatccaaaacctgaaggtgttcgagaaatacatagtgtccgcactcggtgaagtaactaaagccgaatttcgacagcgcgaggattttaagaaaagcggcgggagcggcgggagcggggggagcactaatctgagcgacatcattgagaaggagactgggaaacagctggtcattcaggagtccatcctgatgctgcctgaggaggtggaggaagtgatcggcaacaagccagagtctgacatcctggtgcacaccgcctacgacgagtccacagatgagaatgtgatgctgctgacctctgacgcccccgagtataagccttgggccctggtcatccaggattctaacggcgagaataagatcaagatgctgagcggaggatccaaaagaaccgccgacggcagcgaattcgagcccaagaagaagaggaaagtctaaccggtcatcatcaccatcaccattgagtttaaacccgctgatcagcctcgactgtgccttctagttgccagccatctgttgtttgcccctcccccgtgccttccttgaccctggaaggtgccactcccactgtcctttcctaataaaatgaggaaattgcatcgcattgtctgagtaggtgtcattctattctggggggtggggtggggcaggacagcaagggggaggattgggaagacaatagcaggcatgctggggatgcggtgggctctatggcttctgaggcggaaagaaccagctggggctcgataccgtcgacctctagctagagcttggcgtaatcatggtcatagctgtttcctgtgtgaaattgttatccgctcacaattccacacaacatacgagccggaagcataaagtgtaaagcctagggtgcctaatgagtgagctaactcacattaattgcgttgcgctcactgcccgctttccagtcgggaaacctgtcgtgccagctgcattaatgaatcggccaacgcgcggggagaggcggtttgcgtattgggcgcacttccgcttcctcgctcactgactcgctgcgctcggtcgttcggctgcggcgagcggtatcagctcactcaaaggcggtaatacggttatccacagaatcaggggataacgcaggaaagaacatgtgagcaaaaggccagcaaaaggccaggaaccgtaaaaaggccgcgttgctggcgtttttccataggctccgcccccctgacgagcatcacaaaaatcgacgctcaagtcagaggtggcgaaacccgacaggactataaagataccaggcgtttccccctggaagctccctcgtgcgctctcctgttccgaccctgccgcttaccggatacctgtccgcctttctcccttcgggaagcgtggcgctttctcatagctcacgctgtaggtatctcagttcggtgtaggtcgttcgctccaagctgggctgtgtgcacgaaccccccgttcagcccgaccgctgcgccttatccggtaactatcgtcttgagtccaacccggtaagacacgacttatcgccactggcagcagccactggtaacaggattagcagagcgaggtatgtaggcggtgctacagagttcttgaagtggtggcctaactacggctacactagaagaacagtatttggtatctgcgctctgctgaagccagttaccttcggaaaaagagttggtagctcttgatccggcaaacaaaccaccgctggtagcggtggtttttttgtttgcaagcagcagattacgcgcagaaaaaaaggatctcaagaagatcctttgatcttttctacggggtctgacactcagtggaacgaaaactcacgttaagggattttggtcatgagattatcaaaaaggatcttcacctagatccttttaaattaaaaatgaagttttaaatcaatctaaagtatatatgagtaaacttggtctgacagttaccaatgcttaatcagtgaggcacctatctcagcgatctgtctatttcgttcatccatagttgcctgactccccgtcgtgtagataactacgatacgggagggcttaccatctggccccagtgctgcaatgataccgcgggacccacgctcaccggctccagatttatcagcaataaaccagccagccggaagggccgagcgcagaagtggtcctgcaactttatccgcctccatccagtctattaattgttgccgggaagctagagtaagtagttcgccagttaatagtttgcgcaacgttgttgccattgctacaggcatcgtggtgtcacgctcgtcgtttggtatggcttcattcagctccggttcccaacgatcaaggcgagttacatgatcccccatgttgtgcaaaaaagcggttagctccttcggtcctccgatcgttgtcagaagtaagttggccgcagtgttatcactcatggttatggcagcactgcataattctcttactgtcatgccatccgtaagatgcttttctgtgactggtgagtactcaaccaagtcattctgagaatagtgtatgcggcgaccgagttgctcttgcccggcgtcaatacgggataataccgcgccacatagcagaactttaaaagtgctcatcattggaaaacgttcttcggggcgaaaactctcaaggatcttaccgctgttgagatccagttcgatgtaacccactcgtgcacccaactgatcttcagcatcttttactttcaccagcgtttctgggtgagcaaaaacaggaaggcaaaatgccgcaaaaaagggaataagggcgacacggaaatgttgaatactcatactcttcctttttcaatattattgaagcatttatcagggttattgtctcatgagcggatacatatttgaatgtatttagaaaaataaacaaataggggttccgcgcacatttccccgaaaagtgccacctgacgtcgacggatcgggagatcgatctcccgatcccctagggtcgactctcagtacaatctgctctgatgccgcatagttaagccagtatctgctccctgcttgtgtgttggaggtcgctgagtagtgcgcgagcaaaatttaagctacaacaaggcaaggcttgaccgacaattgcatgaagaatctgcttagggttaggcgttttgcgctgcttcgcgatgtacgggccagatatacgcgttgacattgattattgactagttattaatagtaatcaattacggggtcattagttcatagcccatatatggagttccgcgttacataacttacggtaaatggcccgcctggctgaccgcccaacgacccccgcccattgacgtcaataatgacgtatgttcccatagtaacgccaatagggactttccattgacgtcaatgggtggagtatttacggtaaactgcccacttggcagtacatcaagtgtatcatatgccaagtacgccccctattgacgtcaatgacggtaaatggcccgcctggcattatgcccagtacatgaccttatgggactttcctacttggcagtacatctacgtattagtcatcgctattaccatggtgatgcggttttggcagtacatcaatgggcgtggatagcggtttgactcacggggatttccaagtctccaccccattgacgtcaatgggagtttgttttggcaccaaaatcaacgggactttccaaaatgtcgtaacaactccgccccattgacgcaaatgggcggtaggcgtgtacggtgggaggtctatataagcagagctggtttagtgaaccgtcagatccgctagagatccgcggccgctaatacgactcactatagggagagccgccaccatgaaacggacagccgacggaagcgagttcgagtcaccaaagaagaagcggaaagtcagttctgaggtggagttttcccacgagtactggatgagacatgccctgaccctggccaagagggcacgggatgagggggcgggtcctgtgggagccgtgctggtgctgaacaatagagtgatcggcgagggctggaacagagccatcggcctgcacgacccaacagcccatgccgaaattatggccctgagacagggcggcctggtcatgcagaactacagactgtttgacgccaccctgtacgtgacattcgagccttgcgtgatgtgcgccggcgccatgatcaactctaggatcggccgcgtggtgtttggcgtgaggaactcaaaaagaggcgccgcaggctccctgatgaacgtgctgaactaccccggcatgaatcaccgcgtcgaaattaccgagggaatcctggcagatgaatgtgccgccctgctgtgcgatttctatcggatgcctagacaggtgttcaattctcagaagaaggcccagagctccatcaactctggcggatctagcggaggatcctctggcagcgagacaccaggaacaagcgagtcagcaacaccagagagcagtggcggcagcagcggcggcagcgcccgcatcctcgctttcgcaatcggaatctctagtatcggatgggccttctctgaaaacgacgaactgaaagactgcggcgtgagaatcttcacaaaggttgaaaaccctaaaacaggcgagtctttagctctgccacgtaggttggcccgctccgcccgaaaaaggtatgctcggcggaaggctcgcctcaaccacttgaagcatttgatagctaatgagttcaaactgaactacgaagattaccagtccttcgacgagtcattggcaaaagcctacaaaggcagccttatcagtccttatgagttgagatttcgcgcactcaacgaactgctttctaagcaagactttgctagggtcattctgcacatcgcaaaacggcgaggttatgacgatatcaagaactccgacgataaagaaaagggagccattctcaaggcgatcaaacagaatgaggaaaaattggcaaactaccagagtgtgggcgagtatctgtataaagagtatttccagaagtttaaggaaaacagcaaggagtttacaaacgtcagaaataaaaaggagtcttacgagagatgcatcgcgcagtcattcctcaaagatgagctgaagctgatatttaagaagcaacgcgaatttggtttctcattctctaagaagttcgaagaggaggttctttccgtggcgttttacaagagggcgctcaaagacttctcccacctggttggtaactgtagtttcttcacggatgagaagcgagctcccaaaaattctcccctggctttcatgtttgttgccctgactcggatcattaacctgctgaacaacctgaaaaatactgaagggatcttgtatacgaaggacgacctaaatgcactcctgaatgaagtgctcaaaaacggaactctaacctataaacagaccaagaaattactggggctctctgacgactacgagttcaagggcgagaagggtacttattttatcgaattcaaaaagtataaggagttcattaaagcattgggggaacacaacctcagccaggacgatctcaatgaaattgccaaggacatcacgctgattaaagacgagataaaactgaaaaaggcactggccaagtatgacctcaaccagaaccagatcgactctctgtccaagctggagttcaaagaccacctaaacatatccttcaaagccctgaaactggtcacccctctaatgctcgaaggaaaaaaatacgacgaggcgtgtaatgaactgaatcttaaggtggccatcaatgaggataagaaggactttcttccagcctttaacgagacatattacaaagacgaggtcacaaacccggttgtgctgagggccataaaagagtatcggaaggttctgaatgccctcctgaagaagtacggcaaagtgcacaaaataaatatcgaattggctagggaggtggggaagaaccattctcagcgagcaaagatcgagaaagagcagaatgagaactacaaagccaagaaagacgccgaactggagtgcgaaaagctggggcttaaaataaacagtaaaaacatcctgaaattaagattgttcaaagagcaaaaggagttttgcgcctactcaggggaaaaaatcaaaatatcagacctgcaggacgagaaaatgctggagatcgaccatatctatccgtatagcaggtcatttgacgattcctacatgaacaaagtgcttgtgtttaccaaacagaaccaagaaaagctgaaccaaaccccctttgaggctttcggaaacgactcagccaagtggcagaaaatcgaagtcctagccaagaatctgcctacaaaaaaacaaaagaggattcttgataagaactataaggacaaggaacagaaaaactttaaagacaggaacctgaatgacacgaggtacattgcgcgactggttctaaactataccaaagactacctggatttcctccctctgagcgacgacgagaatactaaactgaatgatacccagaaaggctcaaaggtccacgttgaggctaagtccgggatgctgactagcgccctccgccacacgtggggcttcagcgccaaagatcggaataatcatcttcatcacgct

SEQ ID NO: 550 - DNA, 8778 bp, synthetic construct
  source 1..8778: mol_type = other DNA
tagttattaatagtaatcaattacggggtcattagttcatagcccatatatggagttccgcgttacataacttacggtaaatggcccgcctggctgaccgcccaacgacccccgcccattgacgtcaataatgacgtatgttcccatagtaacgccaatagggactttccattgacgtcaatgggtggagtatttacggtaaactgcccacttggcagtacatcaagtgtatcatatgccaagtacgccccctattgacgtcaatgacggtaaatggcccgcctggcattatgcccagtacatgaccttatgggactttcctacttggcagtacatctacgtattagtcatcgctattaccatggtgatgcggttttggcagtacatcaatgggcgtggatagcggtttgactcacggggatttccaagtctccaccccattgacgtcaatgggagtttgttttggcaccaaaatcaacgggactttccaaaatgtcgtaacaactccgccccattgacgcaaatgggcggtaggcgtgtacggtgggaggtctatataagcagagctggtttagtgaaccgtcagatccgctagagatccgcggccgctaatacgactcactatagggagagccgccaccatgaaacggacagccgacggaagcgagttcgagtcaccaaagaagaagcggaaagtcagttctgaggtggagttttcccacgagtactggatgagacatgccctgaccctggccaagagggcacgggatgagggggcgggtcctgtgggagccgtgctggtgctgaacaatagagtgatcggcgagggctggaacagagccatcggcctgcacgacccaacagcccatgccgaaattatggccctgagacagggcggcctggtcatgcagaactacagactgtttgacgccaccctgtacgtgacattcgagccttgcgtgatgtgcgccggcgccatgatcaactctaggatcggccgcgtggtgtttggcgtgaggaactcaaaaagaggcgccgcaggctccctgatgaacgtgctgaactaccccggcatgaatcaccgcgtcgaaattaccgagggaatcctggcagatgaatgtgccgccctgctgtgcgatttctatcggatgcctagacaggtgttcaattctcagaagaaggcccagagctccatcaactctggcggatctagcggaggatcctctggcagcgagacaccaggaacaagcgagtcagcaacaccagagagcagtggcggcagcagcggcggcagcgacaagaagtacagcatcggcctggccatcggcaccaactctgtgggctgggccgtgatcaccgacgagtacaaggtgcccagcaagaaattcaaggtgctgggcaacaccgaccggcacagcatcaagaagaacctgatcggagccctgctgttcgacagcggcgaaacagccgaggccacccggctgaagagaaccgccagaagaagatacaccagacggaagaaccggatctgctatctgcaagagatcttcagcaacgagatggccaaggtggacgacagcttcttccacagactggaagagtccttcctggtggaagaggataagaagcacgagcggcaccccatcttcggcaacatcgtggacgaggtggcctaccacgagaagtaccccaccatctaccacctgagaaagaaactggtggacagcaccgacaaggccgacctgcggctgatctatctggccctggcccacatgatcaagttccggggccacttcctgatcgagggcgacctgaaccccgacaacagcgacgtggacaagctgttcatccagctggtgcagacctacaaccagctgttcgaggaaaaccccatcaacgccagcggcgtggacgccaaggccatcctgtctgccagactgagcaagagcagacggctggaaaatctgatcgcccagctgcccggcgagaagaagaatggcctgttcggaaacctgattgccctgagcctgggcctgacccccaacttcaagagcaacttcgacctggccgaggatgccaaactgcagctgagcaaggacacctacgacgacgacctggacaacctgctggcccagatcggcgaccagtacgccgacctgtttctggccgccaagaacctgtccgacgccatcctgctgagcgacatcctgagagtgaacaccgagatcaccaaggcccccctgagcgcctctatgatcaagagatacgacgagcaccaccaggacctgaccctgctgaaagctctcgtgcggcagcagctgcctgagaagtacaaagagattttcttcgaccagagcaagaacggctacgccggctacattgacggcggagccagccaggaagagttctacaagttcatcaagcccatcctggaaaagatggacggcaccgaggaactgctcgtgaagctgaacagagaggacctgctgcggaagcagcggaccttcgacaacggcagcatcccccaccagatccacctgggagagctgcacgccattctgcggcggcaggaagatttttacccattcctgaaggacaaccgggaaaagatcgagaagatcctgaccttccgcatcccctactacgtgggccctctggccaggggaaacagcagattcgcctggatgaccagaaagagcgaggaaaccatcaccccctggaacttcgaggaagtggtggacaagggcgcttccgcccagagcttcatcgagcggatgaccaacttcgataagaacctgcccaacgagaaggtgctgcccaagcacagcctgctgtacgagtacttcaccgtgtataacgagctgaccaaagtgaaatacgtgaccgagggaatgagaaagcccgccttcctgagcggcgagcagaaaaaggccatcgtggacctgctgttcaagaccaaccggaaagtgaccgtgaagcagctgaaagaggactacttcaagaaaatcgagtgcttcgactccgtggaaatctccggcgtggaagatcggttcaacgcctccctgggcacataccacgatctgctgaaaattatcaaggacaaggacttcctggacaatgaggaaaacgaggacattctggaagatatcgtgctgaccctgacactgtttgaggacagagagatgatcgaggaacggctgaaaacctatgcccacctgttcgacgacaaagtgatgaagcagctgaagcggcggagatacaccggctggggcaggctgagccggaagctgatcaacggcatccgggacaagcagtccggcaagacaatcctggatttcctgaagtccgacggcttcgccaacagaaacttcatgcagctgatccacgacgacagcctgacctttaaagaggacatccagaaagcccaggtgtccggccagggcgatagcctgcacgagcacattgccaatctggccggcagccccgccattaagaagggcatcctgcagacagtgaaggtggtggacgagctcgtgaaagtgatgggccggcacaagcccgagaacatcgtgatcgaaatggccagagagaaccagaccacccagaagggacagaagaacagccgcgagagaatgaagcggatcgaagagggcatcaaagagctgggcagccagatcctgaaagaacaccccgtggaaaacacccagctgcagaacgagaagctgtacctgtactacctgcagaatgggcgggatatgtacgtggaccaggaactggacatcaaccggctgtccgactacgatgtggaccatatcgtgcctcagagctttctgaaggacgactccatcgacaacaaggtgctgaccagaagcgacaagaaccggggcaagagcgacaacgtgccctccgaagaggtcgtgaagaagatgaagaactactggcggcagctgctgaacgccaagctgattacccagagaaagttcgacaatctgaccaaggccgagagaggcggcctgagcgaactggataaggccggcttcatcaagagacagctggtggaaacccggcagatcacaaagcacgtggcacagatcctggactcccggatgaacactaagtacgacgagaatgacaagctgatccgggaagtgaaagtgatcaccctgaagtccaagctggtgtccgatttccggaaggatttccagttttacaaagtgcgcgagatcaacaactaccaccacgcccacgacgcctacctgaacgccgtcgtgggaaccgccctgatcaaaaagtaccctaagctggaaagcgagttcgtgtacggcgactacaaggtgtacgacgtgcggaagatgatcgccaagagcgagcaggaaatcggcaaggctaccgccaagtacttcttctacagcaacatcatgaactttttcaagaccgagattaccctggccaacggcgagatccggaagcggcctctgatcgagacaaacggcgaaaccggggagatcgtgtgggataagggccgggattttgccaccgtgcggaaagtgctgagcatgccccaagtgaatatcgtgaaaaagaccgaggtgcagacaggcggcttcagcaaagagtctatcctgcccaagaggaacagcgataagctgatcgccagaaagaaggactgggaccctaagaagtacggcggcttcgacagccccaccgtggcctattctgtgctggtggtggccaaagtggaaaagggcaagtccaagaaactgaagagtgtgaaagagctgctggggatcaccatcatggaaagaagcagcttcgagaagaatcccatcgactttctggaagccaagggctacaaagaagtgaaaaaggacctgatcatcaagctgcctaagtactccctgttcgagctggaaaacggccggaagagaatgctggcctctgccggcgaactgcagaagggaaacgaactggccctgccctccaaatatgtgaacttcctgtacctggccagccactatgagaagctgaagggctcccccgaggataatgagcagaaacagctgtttgtggaacagcacaagcactacctggacgagatcatcgagcagatcagcgagttctccaagagagtgatcctggccgacgctaatctggacaaagtgctgtccgcctacaacaagcaccgggataagcccatcagagagcaggccgagaatatcatccacctgtttaccctgaccaatctgggagcccctgccgccttcaagtactttgacaccaccatcgaccggaagaggtacaccagcaccaaagaggtgctggacgccaccctgatccaccagagcatcaccggcctgtacgagacacggatcgacctgtctcagctgggaggtgacagcggcgggagcggcgggagcggggggagcactaatctgagcgacatcattgagaaggagactgggaaacagctggtcattcaggagtccatcctgatgctgcctgaggaggtggaggaagtgatcggcaacaagccagagtctgacatcctggtgcacaccgcctacgacgagtccacagatgagaatgtgatgctgctgacctctgacgcccccgagtataagccttgggccctggtcatccaggattctaacggcgagaataagatcaagatgctgagcggaggatccggaggatctggaggcagcaccaacctgtctgacatcatcgagaaggagacaggcaagcagctggtcatccaggagagcatcctgatgctgcccgaagaagtcgaagaagtgatcggaaacaagcctgagagcgatatcctggtccataccgcctacgacgagagtaccgacgaaaatgtgatgctgctgacatccgacgccccagagtataagccctgggctctggtcatccaggattccaacggagagaacaaaatcaaaatgctgtctggcggctcaaaaagaaccgccgacggcagcgaattcgagcccaagaagaagaggaaagtctaaccggtcatcatcaccatcaccattgagtttaaacccgctgatcagcctcgactgtgccttctagttgccagccatctgttgtttgcccctcccccgtgccttccttgaccctggaaggtgccactcccactgtcctttcctaataaaatgaggaaattgcatcgcattgtctgagtaggtgtcattctattctggggggtggggtggggcaggacagcaagggggaggattgggaagacaatagcaggcatgctggggatgcggtgggctctatggcttctgaggcggaaagaaccagctggggctcgataccgtcgacctctagctagagcttggcgtaatcatggtcatagctgtttcctgtgtgaaattgttatccgctcacaattccacacaacatacgagccggaagcataaagtgtaaagcctagggtgcctaatgagtgagctaactcacattaattgcgttgcgctcactgcccgctttccagtcgggaaacctgtcgtgccagctgcattaatgaatcggccaacgcgcgggaagaggcggtttgcgtattgggcgcacttccgcttcctcgctcactgactcgctgcgctcggtcgttcggctgcggcgagcggtatcagctcactcaaaggcggtaatacggttatccacagaatcaggggataacgcaggaaagaacatgtgagcaaaaggccagcaaaaggccaggaaccgtaaaaaggccgcgttgctggcgtttttccataggctccgcccccctgacgagcatcacaaaaatcgacgctcaagtcagaggtggcgaaacccgacaggactataaagataccaggcgtttccccctggaagctccctcgtgcgctctcctgttccgaccctgccgcttaccggatacctgtccgcctttctcccttcgggaagcgtggcgctttctcatagctcacgctgtaggtatctcagttcggtgtaggtcgttcgctccaagctgggctgtgtgcacgaaccccccgttcagcccgaccgctgcgccttatccggtaactatcgtcttgagtccaacccggtaagacacgacttatcgccactggcagcagccactggtaacaggattagcagagcgaggtatgtaggcggtgctacagagttcttgaagtggtggcctaactacggctacactagaagaacagtatttggtatctgcgctctgctgaagccagttaccttcggaaaaagagttggtagctcttgatccggcaaacaaaccaccgctggtagcggtggtttttttgtttgcaagcagcagattacgcgcagaaaaaaaggatctcaagaaaatcctttgatcttttctacggggtctgacactcagtggaacgaaaactcacgttaagggattttggtcatgagattatcaaaaaggatcttcacctagatccttttaaattaaaaatgaagttttaaatcaatctaaagtatatatgagtaaacttggtctgacagttaccaatgcttaatcagtgaggcacctatctcagcgatctgtctatttcgttcatccatagttgcctgactccccgtcgtgtagataactacgatacgggagggcttaccatctggccccagtgctgcaatgataccgcgggacccacgctcaccggctccagatttatcagcaataaaccagccagccggaagggccgagcgcagaagtggtcctgcaactttatccgcctccatccagtctattaattgttgccgggaagctagagtaagtagttcgccagttaatagtttgcgcaacgttgttgccattgctacaggcatcgtggtgtcacgctcgtcgtttggtatggcttcattcagctccggttcccaacgatcaaggcgagttacatgatcccccatgttgtgcaaaaaagcggttagctccttcggtcctccgatcgttgtcagaagtaagttggccgcagtgttatcactcatggttatggcagcactgcataattctcttactgtcatgccatccgtaagatgcttttctgtgactggtgagtactcaaccaagtcattctgagaatagtgtatgcggcgaccgagttgctcttgcccggcgtcaatacgggataataccgcgccacatagcagaactttaaaagtgctcatcattggaaaacgttcttcggggcgaaaactctcaaggatcttaccgctgttgagatccagttcgatgtaacccactcgtgcacccaactgatcttcagcatcttttactttcaccagcgtttctgggtgagcaaaaacaggaaggcaaaatgccgcaaaaaagggaataagggcgacacggaaatgttgaatactcatactcttcctttttcaatattattgaagcatttatcagggttattgtctcatgagcggatacatatttgaatgtatttagaaaaataaacaaataggggttccgcgcacatttccccgaaaagtgccacctgacgtcgacggatcgggagatcgatctcccgatcccctagggtcgactctcagtacaatctgctctgatgccgcatagttaagccagtatctgctccctgcttgtgtgttggaggtcgctgagtagtgcgcgagcaaaatttaagctacaacaaggcaaggcttgaccgacaattgcatgaagaatctgcttagggttaggcgttttgcgctgcttcgcgatgtacgggccagatatacgcgttgacattgattattgac

SEQ ID NO: 551 - DNA, 7836 bp, synthetic construct
  source 1..7836: mol_type = other DNA
tagttattaatagtaatcaattacggggtcattagttcatagcccatatatggagttccgcgttacataacttacggtaaatggcccgcctggctgaccgcccaacgacccccgcccattgacgtcaataatgacgtatgttcccatagtaacgccaatagggactttccattgacgtcaatgggtggagtatttacggtaaactgcccacttggcagtacatcaagtgtatcatatgccaagtacgccccctattgacgtcaatgacggtaaatggcccgcctggcattatgcccagtacatgaccttatgggactttcctacttggcagtacatctacgtattagtcatcgctattaccatggtgatgcggttttggcagtacatcaatgggcgtggatagcggtttgactcacggggatttccaagtctccaccccattgacgtcaatgggagtttgttttggcaccaaaatcaacgggactttccaaaatgtcgtaacaactccgccccattgacgcaaatgggcggtaggcgtgtacggtgggaggtctatataagcagagctggtttagtgaaccgtcagatccgctagagatccgcggccgctaatacgactcactatagggagagccgccaccatgaaacggacagccgacggaagcgagttcgagtcaccaaagaagaagcggaaagtcagttctgaggtggagttttcccacgagtactggatgagacatgccctgaccctggccaagagggcacgggatgagggggcgggtcctgtgggagccgtgctggtgctgaacaatagagtgatcggcgagggctggaacagagccatcggcctgcacgacccaacagcccatgccgaaattatggccctgagacagggcggcctggtcatgcagaactacagactgtttgacgccaccctgtacgtgacattcgagccttgcgtgatgtgcgccggcgccatgatcaactctaggatcggccgcgtggtgtttggcgtgaggaactcaaaaagaggcgccgcaggctccctgatgaacgtgctgaactaccccggcatgaatcaccgcgtcgaaattaccgagggaatcctggcagatgaatgtgccgccctgctgtgcgatttctatcggatgcctagacaggtgttcaattctcagaagaaggcccagagctccatcaactctggcggatctagcggaggatcctctggcagcgagacaccaggaacaagcgagtcagcaacaccagagagcagtggcggcagcagcggcggcagcgggaagcgaaattacattctggggctggccattggcattacatcagtgggctatggcatcattgactacgagacaagggacgtgatcgacgccggcgtgagactgttcaaggaggccaacgtggagaacaatgagggccggagatccaagaggggagcaaggcgcctgaagcggagaaggcgccacagaatccagagagtgaagaagctgctgttcgattacaacctgctgaccgaccactccgagctgtctggcatcaatccttatgaggccagagtgaagggcctgtcccagaagctgtctgaggaggagtttagcgccgccctgctgcacctggcaaagaggagaggcgtgcacaacgtgaatgaggtggaggaggacaccggcaacgagctgtccacaaaggagcagatcagccgcaattccaaggccctggaggagaagtatgtggccgagctgcagctggagcggctgaagaaggatggcgaggtgaggggctccatcaatcgcttcaagacctctgactacgtgaaggaggccaagcagctgctgaaggtgcagaaggcctaccaccagctggatcagtcctttatcgatacatatatcgacctgctggagacaaggcgcacatactatgagggaccaggagagggctctcccttcggctggaaggacatcaaggagtggtacgagatgctgatgggccactgcacctattttccagaggagctgagaagcgtgaagtacgcctataacgccgatctgtacaacgccctgaatgacctgaacaacctggtcatcaccagggatgagaacgagaagctggagtactatgagaagttccagatcatcgagaacgtgttcaagcagaagaagaagcctacactgaagcagatcgccaaggagatcctggtgaacgaggaggacatcaagggctaccgcgtgacctccacaggcaagccagagttcaccaatctgaaggtgtatcacgatatcaaggacatcacagcccggaaggagatcatcgagaacgccgagctgctggatcagatcgccaagatcctgaccatctatcagagctccgaggacatccaggaggagctgaccaacctgaatagcgagctgacacaggaggagatcgagcagatcagcaatctgaagggctacaccggcacacacaacctgagcctgaaggccatcaatctgatcctggatgagctgtggcacacaaacgacaatcagatcgccatctttaaccggctgaagctggtgccaaagaaggtggacctgtcccagcagaaggagatcccaaccacactggtggacgatttcatcctgtctcccgtggtgaagcggagcttcatccagagcatcaaagtgatcaacgccatcatcaagaagtacggcctgcccaatgatatcatcatcgagctggccagggagaagaactccaaggacgcccagaagatgatcaatgagatgcagaagaggaaccgccagaccaatgagcggatcgaggagatcatcagaaccacaggcaaggagaacgccaagtacctgatcgagaagatcaagctgcacgatatgcaggagggcaagtgtctgtattctctggaggccatccctctggaggacctgctgaacaatccattcaactacgaggtggatcacatcatcccccggagcgtgagcttcgacaattcttttaacaataaggtgctggtgaagcaggaggagaacagcaagaagggcaataggacccctttccagtacctgtctagctccgattctaagatcagctacgagacattcaagaagcacatcctgaatctggccaagggcaagggccgcatcagcaagaccaagaaggagtacctgctggaggagcgggacatcaacagattctccgtgcagaaggacttcatcaaccggaatctggtggacaccagatacgccacacgcggcctgatgaatctgctgcggtcttatttcagagtgaacaatctggatgtgaaggtaaagagcatcaacggcggcttcacctcctttctgcggagaaagtggaagtttaagaaggagcgcaacaagggctataagcaccacgccgaggatgccctgatcatcgccaatgccgacttcatctttaaggagtggaagaagctggacaaggccaagaaagtgatggagaaccagatgttcgaggagaagcaggccgagagcatgcccgagatcgagacagagcaggagtacaaggagattttcatcacacctcaccagatcaagcacatcaaggacttcaaggactacaagtattctcacagggtggataagaagcccaaccgcgagctgatcaatgacaccctgtatagcacacggaaggacgataagggcaataccctgatcgtgaacaatctgaacggcctgtacgacaaggataatgacaagctgaagaagctgatcaacaagtctcccgagaagctgctgatgtaccaccacgatcctcagacatatcagaagctgaagctgatcatggagcagtacggcgacgagaagaacccactgtataagtactatgaggagacaggcaactacctgacaaagtatagcaagaaggataatggccccgtgatcaagaagatcaagtactatggcaacaagctgaatgcccacctggacatcaccgacgattaccctaactctcgcaataaggtggtgaagctgagcctgaagccataccggttcgacgtgtacctggacaacggcgtgtataagtttgtgacagtgaagaatctggatgtgatcaagaaggagaactactatgaggtgaacagcaagtgctacgaggaggccaagaagctgaagaagatcagcaaccaggccgagttcatcgcctctttttacaacaatgacctgatcaagatcaatggcgagctgtatagagtgatcggcgtgaacaatgatctgctgaacagaatcgaagtgaatatgatcgacatcacctacagggagtatctggagaacatgaatgataagaggccccctcgcatcatcaagaccatcgcctctaagacacagagcatcaagaagtacagcacagacatcctggggaacctgtatgaagtcaagagcaagaaacatcctcagattatcaagaaaggcagcggcgggagcggcgggagcggggggagcactaatctgagcgacatcattgagaaggagactgggaaacagctggtcattcaggagtccatcctgatgctgcctgaggaggtggaggaagtgatcggcaacaagccagagtctgacatcctggtgcacaccgcctacgacgagtccacagatgagaatgtgatgctgctgacctctgacgcccccgagtataagccttgggccctggtcatccaggattctaacggcgagaataagatcaagatgctgagcggaggatccggaggatctggaggcagcaccaacctgtctgacatcatcgagaaggagacaggcaagcagctggtcatccaggagagcatcctgatgctgcccgaagaagtcgaagaagtgatcggaaacaagcctgagagcgatatcctggtccataccgcctacgacgagagtaccgacgaaaatgtgatgctgctgacatccgacgccccagagtataagccctgggctctggtcatccaggattccaacggagagaacaaaatcaaaatgctgtctggcggctcaaaaagaaccgccgacggcagcgaattcgagcccaagaagaagaggaaagtctaaccggtcatcatcaccatcaccattgagtttaaacccgctgatcagcctcgactgtgccttctagttgccagccatctgttgtttgcccctcccccgtgccttccttgaccctggaaggtgccactcccactgtcctttcctaataaaatgaggaaattgcatcgcattgtctgagtaggtgtcattctattctggggggtggggtggggcaggacagcaagggggaggattgggaagacaatagcaggcatgctggggatgcggtgggctctatggcttctgaggcggaaagaaccagctggggctcgataccgtcgacctctagctagagcttggcgtaatcatggtcatagctgtttcctgtgtgaaattgttatccgctcacaattccacacaacatacgagccggaagcataaagtgtaaagcctagggtgcctaatgagtgagctaactcacattaattgcgttgcgctcactgcccgctttccagtcgggaaacctgtcgtgccagctgcattaatgaatcggccaacgcgcgggaagaggcggtttgcgtattgggcgcacttccgcttcctcgctcactgactcgctgcgctcggtcgttcggctgcggcgagcggtatcagctcactcaaaggcggtaatacggttatccacagaatcaggggataacgcaggaaagaacatgtgagcaaaaggccagcaaaaggccaggaaccgtaaaaaggccgcgttgctggcgtttttccataggctccgcccccctgacgagcatcacaaaaatcgacgctcaagtcagaggtggcgaaacccgacaggactataaagataccaggcgtttccccctggaagctccctcgtgcgctctcctgttccgaccctgccgcttaccggatacctgtccgcctttctcccttcgggaagcgtggcgctttctcatagctcacgctgtaggtatctcagttcggtgtaggtcgttcgctccaagctgggctgtgtgcacgaaccccccgttcagcccgaccgctgcgccttatccggtaactatcgtcttgagtccaacccggtaagacacgacttatcgccactggcagcagccactggtaacaggattagcagagcgaggtatgtaggcggtgctacagagttcttgaagtggtggcctaactacggctacactagaagaacagtatttggtatctgcgctctgctgaagccagttaccttcggaaaaagagttggtagctcttgatccggcaaacaaaccaccgctggtagcggtggtttttttgtttgcaagcagcagattacgcgcagaaaaaaaggatctcaagaaaatcctttgatcttttctacggggtctgacactcagtggaacgaaaactcacgttaagggattttggtcatgagattatcaaaaaggatcttcacctagatccttttaaattaaaaatgaagttttaaatcaatctaaagtatatatgagtaaacttggtctgacagttaccaatgcttaatcagtgaggcacctatctcagcgatctgtctatttcgttcatccatagttgcctgactccccgtcgtgtagataactacgatacgggagggcttaccatctggccccagtgctgcaatgataccgcgggacccacgctcaccggctccagatttatcagcaataaaccagccagccggaagggccgagcgcagaagtggtcctgcaactttatccgcctccatccagtctattaattgttgccgggaagctagagtaagtagttcgccagttaatagtttgcgcaacgttgttgccattgctacaggcatcgtggtgtcacgctcgtcgtttggtatggcttcattcagctccggttcccaacgatcaaggcgagttacatgatcccccatgttgtgcaaaaaagcggttagctccttcggtcctccgatcgttgtcagaagtaagttggccgcagtgttatcactcatggttatggcagcactgcataattctcttactgtcatgccatccgtaagatgcttttctgtgactggtgagtactcaaccaagtcattctgagaatagtgtatgcggcgaccgagttgctcttgcccggcgtcaatacgggataataccgcgccacatagcagaactttaaaagtgctcatcattggaaaacgttcttcggggcgaaaactctcaaggatcttaccgctgttgagatccagttcgatgtaacccactcgtgcacccaactgatcttcagcatcttttactttcaccagcgtttctgggtgagcaaaaacaggaaggcaaaatgccgcaaaaaagggaataagggcgacacggaaatgttgaatactcatactcttcctttttcaatattattgaagcatttatcagggttattgtctcatgagcggatacatatttgaatgtatttagaaaaataaacaaataggggttccgcgcacatttccccgaaaagtgccacctgacgtcgacggatcgggagatcgatctcccgatcccctagggtcgactctcagtacaatctgctctgatgccgcatagttaagccagtatctgctccctgcttgtgtgttggaggtcgctgagtagtgcgcgagcaaaatttaagctacaacaaggcaaggcttgaccgacaattgcatgaagaatctgcttagggttaggcgttttgcgctgcttcgcgatgtacgggccagatatacgcgttgacattgattattgac

SEQ ID NO: 552 - DNA, 8778 bp, synthetic construct
  source 1..8778: mol_type = other DNA
tagttattaatagtaatcaattacggggtcattagttcatagcccatatatggagttccgcgttacataacttacggtaaatggcccgcctggctgaccgcccaacgacccccgcccattgacgtcaataatgacgtatgttcccatagtaacgccaatagggactttccattgacgtcaatgggtggagtatttacggtaaactgcccacttggcagtacatcaagtgtatcatatgccaagtacgccccctattgacgtcaatgacggtaaatggcccgcctggcattatgcccagtacatgaccttatgggactttcctacttggcagtacatctacgtattagtcatcgctattaccatggtgatgcggttttggcagtacatcaatgggcgtggatagcggtttgactcacggggatttccaagtctccaccccattgacgtcaatgggagtttgttttggcaccaaaatcaacgggactttccaaaatgtcgtaacaactccgccccattgacgcaaatgggcggtaggcgtgtacggtgggaggtctatataagcagagctggtttagtgaaccgtcagatccgctagagatccgcggccgctaatacgactcactatagggagagccgccaccatgaaacggacagccgacggaagcgagttcgagtcaccaaagaagaagcggaaagtcagttctgaggtggagttttcccacgagtactggatgagacatgccctgaccctggccaagagggcacgggatgagggggcgggtcctgtgggagccgtgctggtgctgaacaatagagtgatcggcgagggctggaacagagccatcggcctgcacgacccaacagcccatgccgaaattatggccctgagacagggcggcctggtcatgcagaactacagactgtttgacgccaccctgtacgtgacattcgagccttgcgtgatgtgcgccggcgccatgatcaactctaggatcggccgcgtggtgtttggcgtgaggaactcaaaaagaggcgccgcaggctccctgatgaacgtgctgaactaccccggcatgaatcaccgcgtcgaaattaccgagggaatcctggcagatgaatgtgccgccctgctgtgcgatttctatcggatgcctagacaggtgttcaattctcagaagaaggcccagagctccatcaactctggcggatctagcggaggatcctctggcagcgagacaccaggaacaagcgagtcagcaacaccagagagcagtggcggcagcagcggcggcagcgacaagaagtacagcatcggcctggccatcggcaccaactctgtgggctgggccgtgatcaccgacgagtacaaggtgcccagcaagaaattcaaggtgctgggcaacaccgaccggcacagcatcaagaagaacctgatcggagccctgctgttcgacagcggcgaaacagccgaggccacccggctgaagagaaccgccagaagaagatacaccagacggaagaaccggatctgctatctgcaagagatcttcagcaacgagatggccaaggtggacgacagcttcttccacagactggaagagtccttcctggtggaagaggataagaagcacgagcggcaccccatcttcggcaacatcgtggacgaggtggcctaccacgagaagtaccccaccatctaccacctgagaaagaaactggtggacagcaccgacaaggccgacctgcggctgatctatctggccctggcccacatgatcaagttccggggccacttcctgatcgagggcgacctgaaccccgacaacagcgacgtggacaagctgttcatccagctggtgcagacctacaaccagctgttcgaggaaaaccccatcaacgccagcggcgtggacgccaaggccatcctgtctgccagactgagcaagagcagacggctggaaaatctgatcgcccagctgcccggcgagaagaagaatggcctgttcggaaacctgattgccctgagcctgggcctgacccccaacttcaagagcaacttcgacctggccgaggatgccaaactgcagctgagcaaggacacctacgacgacgacctggacaacctgctggcccagatcggcgaccagtacgccgacctgtttctggccgccaagaacctgtccgacgccatcctgctgagcgacatcctgagagtgaacaccgagatcaccaaggcccccctgagcgcctctatgatcaagagatacgacgagcaccaccaggacctgaccctgctgaaagctctcgtgcggcagcagctgcctgagaagtacaaagagattttcttcgaccagagcaagaacggctacgccggctacattgacggcggagccagccaggaagagttctacaagttcatcaagcccatcctggaaaagatggacggcaccgaggaactgctcgtgaagctgaacagagaggacctgctgcggaagcagcggaccttcgacaacggcagcatcccccaccagatccacctgggagagctgcacgccattctgcggcggcaggaagatttttacccattcctgaaggacaaccgggaaaagatcgagaagatcctgaccttccgcatcccctactacgtgggccctctggccaggggaaacagcagattcgcctggatgaccagaaagagcgaggaaaccatcaccccctggaacttcgaggaagtggtggacaagggcgcttccgcccagagcttcatcgagcggatgaccaacttcgataagaacctgcccaacgagaaggtgctgcccaagcacagcctgctgtacgagtacttcaccgtgtataacgagctgaccaaagtgaaatacgtgaccgagggaatgagaaagcccgccttcctgagcggcgagcagaaaaaggccatcgtggacctgctgttcaagaccaaccggaaagtgaccgtgaagcagctgaaagaggactacttcaagaaaatcgagtgcttcgactccgtggaaatctccggcgtggaagatcggttcaacgcctccctgggcacataccacgatctgctgaaaattatcaaggacaaggacttcctggacaatgaggaaaacgaggacattctggaagatatcgtgctgaccctgacactgtttgaggacagagagatgatcgaggaacggctgaaaacctatgcccacctgttcgacgacaaagtgatgaagcagctgaagcggcggagatacaccggctggggcaggctgagccggaagctgatcaacggcatccgggacaagcagtccggcaagacaatcctggatttcctgaagtccgacggcttcgccaacagaaacttcatgcagctgatccacgacgacagcctgacctttaaagaggacatccagaaagcccaggtgtccggccagggcgatagcctgcacgagcacattgccaatctggccggcagccccgccattaagaagggcatcctgcagacagtgaaggtggtggacgagctcgtgaaagtgatgggccggcacaagcccgagaacatcgtgatcgaaatggccagagagaaccagaccacccagaagggacagaagaacagccgcgagagaatgaagcggatcgaagagggcatcaaagagctgggcagccagatcctgaaagaacaccccgtggaaaacacccagctgcagaacgagaagctgtacctgtactacctgcagaatgggcgggatatgtacgtggaccaggaactggacatcaaccggctgtccgactacgatgtggaccatatcgtgcctcagagctttctgaaggacgactccatcgacaacaaggtgctgaccagaagcgacaagaaccggggcaagagcgacaacgtgccctccgaagaggtcgtgaagaagatgaagaactactggcggcagctgctgaacgccaagctgattacccagagaaagttcgacaatctgaccaaggccgagagaggcggcctgagcgaactggataaggccggcttcatcaagagacagctggtggaaacccggcagatcacaaagcacgtggcacagatcctggactcccggatgaacactaagtacgacgagaatgacaagctgatccgggaagtgaaagtgatcaccctgaagtccaagctggtgtccgatttccggaaggatttccagttttacaaagtgcgcgagatcaacaactaccaccacgcccacgacgcctacctgaacgccgtcgtgggaaccgccctgatcaaaaagtaccctaagctggaaagcgagttcgtgtacggcgactacaaggtgtacgacgtgcggaagatgatcgccaagagcgagcaggaaatcggcaaggctaccgccaagtacttcttctacagcaacatcatgaactttttcaagaccgagattaccctggccaacggcgagatccggaagcggcctctgatcgagacaaacggcgaaaccggggagatcgtgtgggataagggccgggattttgccaccgtgcggaaagtgctgagcatgccccaagtgaatatcgtgaaaaagaccgaggtgcagacaggcggcttcagcaaagagtctatccggcccaagaggaacagcgataagctgatcgccagaaagaaggactgggaccctaagaagtacggcggcttcgtgagccccaccgtggcctattctgtgctggtggtggccaaagtggaaaagggcaagtccaagaaactgaagagtgtgaaagagctgctggggatcaccatcatggaaagaagcagcttcgagaagaatcccatcgactttctggaagccaagggctacaaagaagtgaaaaaggacctgatcatcaagctgcctaagtactccctgttcgagctggaaaacggccggaagagaatgctggcctctgcccggttcctgcagaagggaaacgaactggccctgccctccaaatatgtgaacttcctgtacctggccagccactatgagaagctgaagggctcccccgaggataatgagcagaaacagctgtttgtggaacagcacaagcactacctggacgagatcatcgagcagatcagcgagttctccaagagagtgatcctggccgacgctaatctggacaaagtgctgtccgcctacaacaagcaccgggataagcccatcagagagcaggccgagaatatcatccacctgtttaccctgaccaatctgggagcccctcgggccttcaagtactttgacaccaccatcgaccggaaggtgtaccggagcaccaaagaggtgctggacgccaccctgatccaccagagcatcaccggcctgtacgagacacggatcgacctgtctcagctgggaggtgacagcggcgggagcggcgggagcggggggagcactaatctgagcgacatcattgagaaggagactgggaaacagctggtcattcaggagtccatcctgatgctgcctgaggaggtggaggaagtgatcggcaacaagccagagtctgacatcctggtgcacaccgcctacgacgagtccacagatgagaatgtgatgctgctgacctctgacgcccccgagtataagccttgggccctggtcatccaggattctaacggcgagaataagatcaagatgctgagcggaggatccggaggatctggaggcagcaccaacctgtctgacatcatcgagaaggagacaggcaagcagctggtcatccaggagagcatcctgatgctgcccgaagaagtcgaagaagtgatcggaaacaagcctgagagcgatatcctggtccataccgcctacgacgagagtaccgacgaaaatgtgatgctgctgacatccgacgccccagagtataagccctgggctctggtcatccaggattccaacggagagaacaaaatcaaaatgctgtctggcggctcaaaaagaaccgccgacggcagcgaattcgagcccaagaagaagaggaaagtctaaccggtcatcatcaccatcaccattgagtttaaacccgctgatcagcctcgactgtgccttctagttgccagccatctgttgtttgcccctcccccgtgccttccttgaccctggaaggtgccactcccactgtcctttcctaataaaatgaggaaattgcatcgcattgtctgagtaggtgtcattctattctggggggtggggtggggcaggacagcaagggggaggattgggaagacaatagcaggcatgctggggatgcggtgggctctatggcttctgaggcggaaagaaccagctggggctcgataccgtcgacctctagctagagcttggcgtaatcatggtcatagctgtttcctgtgtgaaattgttatccgctcacaattccacacaacatacgagccggaagcataaagtgtaaagcctagggtgcctaatgagtgagctaactcacattaattgcgttgcgctcactgcccgctttccagtcgggaaacctgtcgtgccagctgcattaatgaatcggccaacgcgcggggagaggcggtttgcgtattgggcgcacttccgcttcctcgctcactgactcgctgcgctcggtcgttcggctgcggcgagcggtatcagctcactcaaaggcggtaatacggttatccacagaatcaggggataacgcaggaaagaacatgtgagcaaaaggccagcaaaaggccaggaaccgtaaaaaggccgcgttgctggcgtttttccataggctccgcccccctgacgagcatcacaaaaatcgacgctcaagtcagaggtggcgaaacccgacaggactataaagataccaggcgtttccccctggaagctccctcgtgcgctctcctgttccgaccctgccgcttaccggatacctgtccgcctttctcccttcgggaagcgtggcgctttctcatagctcacgctgtaggtatctcagttcggtgtaggtcgttcgctccaagctgggctgtgtgcacgaaccccccgttcagcccgaccgctgcgccttatccggtaactatcgtcttgagtccaacccggtaagacacgacttatcgccactggcagcagccactggtaacaggattagcagagcgaggtatgtaggcggtgctacagagttcttgaagtggtggcctaactacggctacactagaagaacagtatttggtatctgcgctctgctgaagccagttaccttcggaaaaagagttggtagctcttgatccggcaaacaaaccaccgctggtagcggtggtttttttgtttgcaagcagcagattacgcgcagaaaaaaaggatctcaagaagatcctttgatcttttctacggggtctgacactcagtggaacgaaaactcacgttaagggattttggtcatgagattatcaaaaaggatcttcacctagatccttttaaattaaaaatgaagttttaaatcaatctaaagtatatatgagtaaacttggtctgacagttaccaatgcttaatcagtgaggcacctatctcagcgatctgtctatttcgttcatccatagttgcctgactccccgtcgtgtagataactacgatacgggagggcttaccatctggccccagtgctgcaatgataccgcgggacccacgctcaccggctccagatttatcagcaataaaccagccagccggaagggccgagcgcagaagtggtcctgcaactttatccgcctccatccagtctattaattgttgccgggaagctagagtaagtagttcgccagttaatagtttgcgcaacgttgttgccattgctacaggcatcgtggtgtcacgctcgtcgtttggtatggcttcattcagctccggttcccaacgatcaaggcgagttacatgatcccccatgttgtgcaaaaaagcggttagctccttcggtcctccgatcgttgtcagaagtaagttggccgcagtgttatcactcatggttatggcagcactgcataattctcttactgtcatgccatccgtaagatgcttttctgtgactggtgagtactcaaccaagtcattctgagaatagtgtatgcggcgaccgagttgctcttgcccggcgtcaatacgggataataccgcgccacatagcagaactttaaaagtgctcatcattggaaaacgttcttcggggcgaaaactctcaaggatcttaccgctgttgagatccagttcgatgtaacccactcgtgcacccaactgatcttcagcatcttttactttcaccagcgtttctgggtgagcaaaaacaggaaggcaaaatgccgcaaaaaagggaataagggcgacacggaaatgttgaatactcatactcttcctttttcaatattattgaagcatttatcagggttattgtctcatgagcggatacatatttgaatgtatttagaaaaataaacaaataggggttccgcgcacatttccccgaaaagtgccacctgacgtcgacggatcgggagatcgatctcccgatcccctagggtcgactctcagtacaatctgctctgatgccgcatagttaagccagtatctgctccctgcttgtgtgttggaggtcgctgagtagtgcgcgagcaaaatttaagctacaacaaggcaaggcttgaccgacaattgcatgaagaatctgcttagggttaggcgttttgcgctgcttcgcgatgtacgggccagatatacgcgttgacattgattattgac

SEQ ID NO: 553 - protein, 1853 aa, synthetic construct
MKRTADGSEFESPKKKRKVSSETGPVAVDPTLRRRIEPHEFEVFFDPRELRKETCLLYEINWGGRHSIWRHTSQNTNKHVEVNFIEKFTTERYFCPNTRCSITWFLSWSPCGECSRAITEFLSRYPHVTLFIYIARLYHHADPRNRQGLRDLISSGVTIQIMTEQESGYCWRNFVNYSPSNEAHWPRYPHLWVRLYVLELYCIILGLPPCLNILRRKQPQLTFFTIALQSCHYQRLPPHILWATGLKSGGSSGGSSGSETPGTSESATPESSGGSSGGSDKKYSIGLAIGTNSVGWAVITDEYKVPSKKFKVLGNTDRHSIKKNLIGALLFDSGETAEATRLKRTARRRYTRRKNRICYLQEIFSNEMAKVDDSFFHRLEESFLVEEDKKHERHPIFGNIVDEVAYHEKYPTIYHLRKKLVDSTDKADLRLIYLALAHMIKFRGHFLIEGDLNPDNSDVDKLFIQLVQTYNQLFEENPINASGVDAKAILSARLSKSRRLENLIAQLPGEKKNGLFGNLIALSLGLTPNFKSNFDLAEDAKLQLSKDTYDDDLDNLLAQIGDQYADLFLAAKNLSDAILLSDILRVNTEITKAPLSASMIKRYDEHHQDLTLLKALVRQQLPEKYKEIFFDQSKNGYAGYIDGGASQEEFYKFIKPILEKMDGTEELLVKLNREDLLRKQRTFDNGSIPHQIHLGELHAILRRQEDFYPFLKDNREKIEKILTFRIPYYVGPLARGNSRFAWMTRKSEETITPWNFEEVVDKGASAQSFIERMTNFDKNLPNEKVLPKHSLLYEYFTVYNELTKVKYVTEGMRKPAFLSGEQKKAIVDLLFKTNRKVTVKQLKEDYFKKIECFDSVEISGVEDRFNASLGTYHDLLKIIKDKDFLDNEENEDILEDIVLTLTLFEDREMIEERLKTYAHLFDDKVMKQLKRRRYTGWGRLSRKLINGIRDKQSGKTILDFLKSDGFANRNFMQLIHDDSLTFKEDIQKAQVSGQGDSLHEHIANLAGSPAIKKGILQTVKVVDELVKVMGRHKPENIVIEMARENQTTQKGQKNSRERMKRIEEGIKELGSQILKEHPVENTQLQNEKLYLYYLQNGRDMYVDQELDINRLSDYDVDHIVPQSFLKDDSIDNKVLTRSDKNRGKSDNVPSEEVVKKMKNYWRQLLNAKLITQRKFDNLTKAERGGLSELDKAGFIKRQLVETRQITKHVAQILDSRMNTKYDENDKLIREVKVITLKSKLVSDFRKDFQFYKVREINNYHHAHDAYLNAVVGTALIKKYPKLESEFVYGDYKVYDVRKMIAKSEQEIGKATAKYFFYSNIMNFFKTEITLANGEIRKRPLIETNGETGEIVWDKGRDFATVRKVLSMPQVNIVKKTEVQTGGFSKESILPKRNSDKLIARKKDWDPKKYGGFDSPTVAYSVLVVAKVEKGKSKKLKSVKELLGITIMERSSFEKNPIDFLEAKGYKEVKKDLIIKLPKYSLFELENGRKRMLASAGELQKGNELALPSKYVNFLYLASHYEKLKGSPEDNEQKQLFVEQHKHYLDEIIEQISEFSKRVILADANLDKVLSAYNKHRDKPIREQAENIIHLFTLTNLGAPAAFKYFDTTIDRKRYTSTKEVLDATLIHQSITGLYETRIDLSQLGGDSGGSGGSGGSTNLSDIIEKETGKQLVIQESILMLPEEVEEVIGNKPESDILVHTAYDESTDENVMLLTSDAPEYKPWALVIQDSNGENKIKMLSGGSGGSGGSTNLSDIIEKETGKQLVIQESILMLPEEVEEVIGNKPESDILVHTAYDESTDENVMLLTSDAPEYKPWALVIQDSNGENKIKMLSGGSKRTADGSEFEPKKKRKV

SEQ ID NO: 554 - protein, 1853 aa, synthetic construct
MKRTADGSEFESPKKKRKVSSETGPVAVDPTLRRRIEPHEFEVFFDPRELRKETCLLYEINWGGRHSIWRHTSQNTNKHVEVNFIEKFTTERYFCPNTRCSITWFLSYSPCGECSRAITEFLSRYPHVTLFIYIARLYHHADPENRQGLRDLISSGVTIQIMTEQESGYCWRNFVNYSPSNEAHWPRYPHLWVRLYVLELYCIILGLPPCLNILRRKQPQLTFFTIALQSCHYQRLPPHILWATGLKSGGSSGGSSGSETPGTSESATPESSGGSSGGSDKKYSIGLAIGTNSVGWAVITDEYKVPSKKFKVLGNTDRHSIKKNLIGALLFDSGETAEATRLKRTARRRYTRRKNRICYLQEIFSNEMAKVDDSFFHRLEESFLVEEDKKHERHPIFGNIVDEVAYHEKYPTIYHLRKKLVDSTDKADLRLIYLALAHMIKFRGHFLIEGDLNPDNSDVDKLFIQLVQTYNQLFEENPINASGVDAKAILSARLSKSRRLENLIAQLPGEKKNGLFGNLIALSLGLTPNFKSNFDLAEDAKLQLSKDTYDDDLDNLLAQIGDQYADLFLAAKNLSDAILLSDILRVNTEITKAPLSASMIKRYDEHHQDLTLLKALVRQQLPEKYKEIFFDQSKNGYAGYIDGGASQEEFYKFIKPILEKMDGTEELLVKLNREDLLRKQRTFDNGSIPHQIHLGELHAILRRQEDFYPFLKDNREKIEKILTFRIPYYVGPLARGNSRFAWMTRKSEETITPWNFEEVVDKGASAQSFIERMTNFDKNLPNEKVLPKHSLLYEYFTVYNELTKVKYVTEGMRKPAFLSGEQKKAIVDLLFKTNRKVTVKQLKEDYFKKIECFDSVEISGVEDRFNASLGTYHDLLKIIKDKDFLDNEENEDILEDIVLTLTLFEDREMIEERLKTYAHLFDDKVMKQLKRRRYTGWGRLSRKLINGIRDKQSGKTILDFLKSDGFANRNFMQLIHDDSLTFKEDIQKAQVSGQGDSLHEHIANLAGSPAIKKGILQTVKVVDELVKVMGRHKPENIVIEMARENQTTQKGQKNSRERMKRIEEGIKELGSQILKEHPVENTQLQNEKLYLYYLQNGRDMYVDQELDINRLSDYDVDHIVPQSFLKDDSIDNKVLTRSDKNRGKSDNVPSEEVVKKMKNYWRQLLNAKLITQRKFDNLTKAERGGLSELDKAGFIKRQLVETRQITKHVAQILDSRMNTKYDENDKLIREVKVITLKSKLVSDFRKDFQFYKVREINNYHHAHDAYLNAVVGTALIKKYPKLESEFVYGDYKVYDVRKMIAKSEQEIGKATAKYFFYSNIMNFFKTEITLANGEIRKRPLIETNGETGEIVWDKGRDFATVRKVLSMPQVNIVKKTEVQTGGFSKESILPKRNSDKLIARKKDWDPKKYGGFDSPTVAYSVLVVAKVEKGKSKKLKSVKELLGITIMERSSFEKNPIDFLEAKGYKEVKKDLIIKLPKYSLFELENGRKRMLASAGELQKGNELALPSKYVNFLYLASHYEKLKGSPEDNEQKQLFVEQHKHYLDEIIEQISEFSKRVILADANLDKVLSAYNKHRDKPIREQAENIIHLFTLTNLGAPAAFKYFDTTIDRKRYTSTKEVLDATLIHQSITGLYETRIDLSQLGGDSGGSGGSGGSTNLSDIIEKETGKQLVIQESILMLPEEVEEVIGNKPESDILVHTAYDESTDENVMLLTSDAPEYKPWALVIQDSNGENKIKMLSGGSGGSGGSTNLSDIIEKETGKQLVIQESILMLPEEVEEVIGNKPESDILVHTAYDESTDENVMLLTSDAPEYKPWALVIQDSNGENKIKMLSGGSKRTADGSEFEPKKKRKV

SEQ ID NO: 555 - protein, 1853 aa, synthetic construct
MKRTADGSEFESPKKKRKVSSETGPVAVDPTLRRRIEPHEFEVFFDPRELRKETCLLYEINWGGRHSIWRHTSQNTNKHVEVNFIEKFTTERYFCPNTRCSITWFLSYSPCGECSRAITEFLSRYPHVTLFIYIARLYHHADPRNRQGLEDLISSGVTIQIMTEQESGYCWRNFVNYSPSNEAHWPRYPHLWVRLYVLELYCIILGLPPCLNILRRKQPQLTFFTIALQSCHYQRLPPHILWATGLKSGGSSGGSSGSETPGTSESATPESSGGSSGGSDKKYSIGLAIGTNSVGWAVITDEYKVPSKKFKVLGNTDRHSIKKNLIGALLFDSGETAEATRLKRTARRRYTRRKNRICYLQEIFSNEMAKVDDSFFHRLEESFLVEEDKKHERHPIFGNIVDEVAYHEKYPTIYHLRKKLVDSTDKADLRLIYLALAHMIKFRGHFLIEGDLNPDNSDVDKLFIQLVQTYNQLFEENPINASGVDAKAILSARLSKSRRLENLIAQLPGEKKNGLFGNLIALSLGLTPNFKSNFDLAEDAKLQLSKDTYDDDLDNLLAQIGDQYADLFLAAKNLSDAILLSDILRVNTEITKAPLSASMIKRYDEHHQDLTLLKALVRQQLPEKYKEIFFDQSKNGYAGYIDGGASQEEFYKFIKPILEKMDGTEELLVKLNREDLLRKQRTFDNGSIPHQIHLGELHAILRRQEDFYPFLKDNREKIEKILTFRIPYYVGPLARGNSRFAWMTRKSEETITPWNFEEVVDKGASAQSFIERMTNFDKNLPNEKVLPKHSLLYEYFTVYNELTKVKYVTEGMRKPAFLSGEQKKAIVDLLFKTNRKVTVKQLKEDYFKKIECFDSVEISGVEDRFNASLGTYHDLLKIIKDKDFLDNEENEDILEDIVLTLTLFEDREMIEERLKTYAHLFDDKVMKQLKRRRYTGWGRLSRKLINGIRDKQSGKTILDFLKSDGFANRNFMQLIHDDSLTFKEDIQKAQVSGQGDSLHEHIANLAGSPAIKKGILQTVKVVDELVKVMGRHKPENIVIEMARENQTTQKGQKNSRERMKRIEEGIKELGSQILKEHPVENTQLQNEKLYLYYLQNGRDMYVDQELDINRLSDYDVDHIVPQSFLKDDSIDNKVLTRSDKNRGKSDNVPSEEVVKKMKNYWRQLLNAKLITQRKFDNLTKAERGGLSELDKAGFIKRQLVETRQITKHVAQILDSRMNTKYDENDKLIREVKVITLKSKLVSDFRKDFQFYKVREINNYHHAHDAYLNAVVGTALIKKYPKLESEFVYGDYKVYDVRKMIAKSEQEIGKATAKYFFYSNIMNFFKTEITLANGEIRKRPLIETNGETGEIVWDKGRDFATVRKVLSMPQVNIVKKTEVQTGGFSKESILPKRNSDKLIARKKDWDPKKYGGFDSPTVAYSVLVVAKVEKGKSKKLKSVKELLGITIMERSSFEKNPIDFLEAKGYKEVKKDLIIKLPKYSLFELENGRKRMLASAGELQKGNELALPSKYVNFLYLASHYEKLKGSPEDNEQKQLFVEQHKHYLDEIIEQISEFSKRVILADANLDKVLSAYNKHRDKPIREQAENIIHLFTLTNLGAPAAFKYFDTTIDRKRYTSTKEVLDATLIHQSITGLYETRIDLSQLGGDSGGSGGSGGSTNLSDIIEKETGKQLVIQESILMLPEEVEEVIGNKPESDILVHTAYDESTDENVMLLTSDAPEYKPWALVIQDSNGENKIKMLSGGSGGSGGSTNLSDIIEKETGKQLVIQESILMLPEEVEEVIGNKPESDILVHTAYDESTDENVMLLTSDAPEYKPWALVIQDSNGENKIKMLSGGSKRTADGSEFEPKKKRKV

SEQ ID NO: 556 - protein, 1853 aa, synthetic construct
MKRTADGSEFESPKKKRKVSSETGPVAVDPTLRRRIEPHEFEVFFDPRELRKETCLLYEINWGGRHSIWRHTSQNTNKHVEVNFIEKFTTERYFCPNTRCSITWFLSYSPCGECSRAITEFLSRYPHVTLFIYIARLYHHADPENRQGLEDLISSGVTIQIMTEQESGYCWRNFVNYSPSNEAHWPRYPHLWVRLYVLELYCIILGLPPCLNILRRKQPQLTFFTIALQSCHYQRLPPHILWATGLKSGGSSGGSSGSETPGTSESATPESSGGSSGGSDKKYSIGLAIGTNSVGWAVITDEYKVPSKKFKVLGNTDRHSIKKNLIGALLFDSGETAEATRLKRTARRRYTRRKNRICYLQEIFSNEMAKVDDSFFHRLEESFLVEEDKKHERHPIFGNIVDEVAYHEKYPTIYHLRKKLVDSTDKADLRLIYLALAHMIKFRGHFLIEGDLNPDNSDVDKLFIQLVQTYNQLFEENPINASGVDAKAILSARLSKSRRLENLIAQLPGEKKNGLFGNLIALSLGLTPNFKSNFDLAEDAKLQLSKDTYDDDLDNLLAQIGDQYADLFLAAKNLSDAILLSDILRVNTEITKAPLSASMIKRYDEHHQDLTLLKALVRQQLPEKYKEIFFDQSKNGYAGYIDGGASQEEFYKFIKPILEKMDGTEELLVKLNREDLLRKQRTFDNGSIPHQIHLGELHAILRRQEDFYPFLKDNREKIEKILTFRIPYYVGPLARGNSRFAWMTRKSEETITPWNFEEVVDKGASAQSFIERMTNFDKNLPNEKVLPKHSLLYEYFTVYNELTKVKYVTEGMRKPAFLSGEQKKAIVDLLFKTNRKVTVKQLKEDYFKKIECFDSVEISGVEDRFNASLGTYHDLLKIIKDKDFLDNEENEDILEDIVLTLTLFEDREMIEERLKTYAHLFDDKVMKQLKRRRYTGWGRLSRKLINGIRDKQSGKTILDFLKSDGFANRNFMQLIHDDSLTFKEDIQKAQVSGQGDSLHEHIANLAGSPAIKKGILQTVKVVDELVKVMGRHKPENIVIEMARENQTTQKGQKNSRERMKRIEEGIKELGSQILKEHPVENTQLQNEKLYLYYLQNGRDMYVDQELDINRLSDYDVDHIVPQSFLKDDSIDNKVLTRSDKNRGKSDNVPSEEVVKKMKNYWRQLLNAKLITQRKFDNLTKAERGGLSELDKAGFIKRQLVETRQITKHVAQILDSRMNTKYDENDKLIREVKVITLKSKLVSDFRKDFQFYKVREINNYHHAHDAYLNAVVGTALIKKYPKLESEFVYGDYKVYDVRKMIAKSEQEIGKATAKYFFYSNIMNFFKTEITLANGEIRKRPLIETNGETGEIVWDKGRDFATVRKVLSMPQVNIVKKTEVQTGGFSKESILPKRNSDKLIARKKDWDPKKYGGFDSPTVAYSVLVVAKVEKGKSKKLKSVKELLGITIMERSSFEKNPIDFLEAKGYKEVKKDLIIKLPKYSLFELENGRKRMLASAGELQKGNELALPSKYVNFLYLASHYEKLKGSPEDNEQKQLFVEQHKHYLDEIIEQISEFSKRVILADANLDKVLSAYNKHRDKPIREQAENIIHLFTLTNLGAPAAFKYFDTTIDRKRYTSTKEVLDATLIHQSITGLYETRIDLSQLGGDSGGSGGSGGSTNLSDIIEKETGKQLVIQESILMLPEEVEEVIGNKPESDILVHTAYDESTDENVMLLTSDAPEYKPWALVIQDSNGENKIKMLSGGSGGSGGSTNLSDIIEKETGKQLVIQESILMLPEEVEEVIGNKPESDILVHTAYDESTDENVMLLTSDAPEYKPWALVIQDSNGENKIKMLSGGSKRTADGSEFEPKKKRKV

SEQ ID NO: 557 - protein, 1853 aa, synthetic construct
MKRTADGSEFESPKKKRKVSSETGPVAVDPTLRRRIEPHEFEVFFDPRELRKETCLLYEINWGGRHSIWRHTSQNTNKHVEVNFIEKFTTERYFCPNTRCSITWFLSWSPCGECSRAITEFLSRYPHVTLFIYIARLYHHADPENRQGLEDLISSGVTIQIMTEQESGYCWRNFVNYSPSNEAHWPRYPHLWVRLYVLELYCIILGLPPCLNILRRKQPQLTFFTIALQSCHYQRLPPHILWATGLKSGGSSGGSSGSETPGTSESATPESSGGSSGGSDKKYSIGLAIGTNSVGWAVITDEYKVPSKKFKVLGNTDRHSIKKNLIGALLFDSGETAEATRLKRTARRRYTRRKNRICYLQEIFSNEMAKVDDSFFHRLEESFLVEEDKKHERHPIFGNIVDEVAYHEKYPTIYHLRKKLVDSTDKADLRLIYLALAHMIKFRGHFLIEGDLNPDNSDVDKLFIQLVQTYNQLFEENPINASGVDAKAILSARLSKSRRLENLIAQLPGEKKNGLFGNLIALSLGLTPNFKSNFDLAEDAKLQLSKDTYDDDLDNLLAQIGDQYADLFLAAKNLSDAILLSDILRVNTEITKAPLSASMIKRYDEHHQDLTLLKALVRQQLPEKYKEIFFDQSKNGYAGYIDGGASQEEFYKFIKPILEKMDGTEELLVKLNREDLLRKQRTFDNGSIPHQIHLGELHAILRRQEDFYPFLKDNREKIEKILTFRIPYYVGPLARGNSRFAWMTRKSEETITPWNFEEVVDKGASAQSFIERMTNFDKNLPNEKVLPKHSLLYEYFTVYNELTKVKYVTEGMRKPAFLSGEQKKAIVDLLFKTNRKVTVKQLKEDYFKKIECFDSVEISGVEDRFNASLGTYHDLLKIIKDKDFLDNEENEDILEDIVLTLTLFEDREMIEERLKTYAHLFDDKVMKQLKRRRYTGWGRLSRKLINGIRDKQSGKTILDFLKSDGFANRNFMQLIHDDSLTFKEDIQKAQVSGQGDSLHEHIANLAGSPAIKKGILQTVKVVDELVKVMGRHKPENIVIEMARENQTTQKGQKNSRERMKRIEEGIKELGSQILKEHPVENTQLQNEKLYLYYLQNGRDMYVDQELDINRLSDYDVDHIVPQSFLKDDSIDNKVLTRSDKNRGKSDNVPSEEVVKKMKNYWRQLLNAKLITQRKFDNLTKAERGGLSELDKAGFIKRQLVETRQITKHVAQILDSRMNTKYDENDKLIREVKVITLKSKLVSDFRKDFQFYKVREINNYHHAHDAYLNAVVGTALIKKYPKLESEFVYGDYKVYDVRKMIAKSEQEIGKATAKYFFYSNIMNFFKTEITLANGEIRKRPLIETNGETGEIVWDKGRDFATVRKVLSMPQVNIVKKTEVQTGGFSKESILPKRNSDKLIARKKDWDPKKYGGFDSPTVAYSVLVVAKVEKGKSKKLKSVKELLGITIMERSSFEKNPIDFLEAKGYKEVKKDLIIKLPKYSLFELENGRKRMLASAGELQKGNELALPSKYVNFLYLASHYEKLKGSPEDNEQKQLFVEQHKHYLDEIIEQISEFSKRVILADANLDKVLSAYNKHRDKPIREQAENIIHLFTLTNLGAPAAFKYFDTTIDRKRYTSTKEVLDATLIHQSITGLYETRIDLSQLGGDSGGSGGSGGSTNLSDIIEKETGKQLVIQESILMLPEEVEEVIGNKPESDILVHTAYDESTDENVMLLTSDAPEYKPWALVIQDSNGENKIKMLSGGSGGSGGSTNLSDIIEKETGKQLVIQESILMLPEEVEEVIGNKPESDILVHTAYDESTDENVMLLTSDAPEYKPWALVIQDSNGENKIKMLSGGSKRTADGSEFEPKKKRKV

SEQ ID NO: 558 - protein, 1853 aa, synthetic construct
MKRTADGSEFESPKKKRKVSSETGPVAVDPTLRRRIEPHEFEVFFDPRELAKETCLLYEINWGGRHSIWRHTSQNTNKHVEVNFIEKFTTERYFCPNTRCSITWFLSWSPCGECSRAITEFLSRYPHVTLFIYIARLYHHADPRNRQGLRDLISSGVTIQIMTEQESGYCWRNFVNYSPSNEAHWPRYPHLWVRLYVLELYCIILGLPPCLNILRRKQPQLTFFTIALQSCHYQRLPPHILWATGLKSGGSSGGSSGSETPGTSESATPESSGGSSGGSDKKYSIGLAIGTNSVGWAVITDEYKVPSKKFKVLGNTDRHSIKKNLIGALLFDSGETAEATRLKRTARRRYTRRKNRICYLQEIFSNEMAKVDDSFFHRLEESFLVEEDKKHERHPIFGNIVDEVAYHEKYPTIYHLRKKLVDSTDKADLRLIYLALAHMIKFRGHFLIEGDLNPDNSDVDKLFIQLVQTYNQLFEENPINASGVDAKAILSARLSKSRRLENLIAQLPGEKKNGLFGNLIALSLGLTPNFKSNFDLAEDAKLQLSKDTYDDDLDNLLAQIGDQYADLFLAAKNLSDAILLSDILRVNTEITKAPLSASMIKRYDEHHQDLTLLKALVRQQLPEKYKEIFFDQSKNGYAGYIDGGASQEEFYKFIKPILEKMDGTEELLVKLNREDLLRKQRTFDNGSIPHQIHLGELHAILRRQEDFYPFLKDNREKIEKILTFRIPYYVGPLARGNSRFAWMTRKSEETITPWNFEEVVDKGASAQSFIERMTNFDKNLPNEKVLPKHSLLYEYFTVYNELTKVKYVTEGMRKPAFLSGEQKKAIVDLLFKTNRKVTVKQLKEDYFKKIECFDSVEISGVEDRFNASLGTYHDLLKIIKDKDFLDNEENEDILEDIVLTLTLFEDREMIEERLKTYAHLFDDKVMKQLKRRRYTGWGRLSRKLINGIRDKQSGKTILDFLKSDGFANRNFMQLIHDDSLTFKEDIQKAQVSGQGDSLHEHIANLAGSPAIKKGILQTVKVVDELVKVMGRHKPENIVIEMARENQTTQKGQKNSRERMKRIEEGIKELGSQILKEHPVENTQLQNEKLYLYYLQNGRDMYVDQELDINRLSDYDVDHIVPQSFLKDDSIDNKVLTRSDKNRGKSDNVPSEEVVKKMKNYWRQLLNAKLITQRKFDNLTKAERGGLSELDKAGFIKRQLVETRQITKHVAQILDSRMNTKYDENDKLIREVKVITLKSKLVSDFRKDFQFYKVREINNYHHAHDAYLNAVVGTALIKKYPKLESEFVYGDYKVYDVRKMIAKSEQEIGKATAKYFFYSNIMNFFKTEITLANGEIRKRPLIETNGETGEIVWDKGRDFATVRKVLSMPQVNIVKKTEVQTGGFSKESILPKRNSDKLIARKKDWDPKKYGGFDSPTVAYSVLVVAKVEKGKSKKLKSVKELLGITIMERSSFEKNPIDFLEAKGYKEVKKDLIIKLPKYSLFELENGRKRMLASAGELQKGNELALPSKYVNFLYLASHYEKLKGSPEDNEQKQLFVEQHKHYLDEIIEQISEFSKRVILADANLDKVLSAYNKHRDKPIREQAENIIHLFTLTNLGAPAAFKYFDTTIDRKRYTSTKEVLDATLIHQSITGLYETRIDLSQLGGDSGGSGGSGGSTNLSDIIEKETGKQLVIQESILMLPEEVEEVIGNKPESDILVHTAYDESTDENVMLLTSDAPEYKPWALVIQDSNGENKIKMLSGGSGGSGGSTNLSDIIEKETGKQLVIQESILMLPEEVEEVIGNKPESDILVHTAYDESTDENVMLLTSDAPEYKPWALVIQDSNGENKIKMLSGGSKRTADGSEFEPKKKRKV

SEQ ID NO: 559 - protein, 1853 aa, synthetic construct
MKRTADGSEFESPKKKRKVSSETGPVAVDPTLRRRIEPHEFEVFFDPRELAAETCLLYEINWGGRHSIWRHTSQNTNKHVEVNFIEKFTTERYFCPNTRCSITWFLSWSPCGECSRAITEFLSRYPHVTLFIYIARLYHHADPRNRQGLRDLISSGVTIQIMTEQESGYCWRNFVNYSPSNEAHWPRYPHLWVRLYVLELYCIILGLPPCLNILRRKQPQLTFFTIALQSCHYQRLPPHILWATGLKSGGSSGGSSGSETPGTSESATPESSGGSSGGSDKKYSIGLAIGTNSVGWAVITDEYKVPSKKFKVLGNTDRHSIKKNLIGALLFDSGETAEATRLKRTARRRYTRRKNRICYLQEIFSNEMAKVDDSFFHRLEESFLVEEDKKHERHPIFGNIVDEVAYHEKYPTIYHLRKKLVDSTDKADLRLIYLALAHMIKFRGHFLIEGDLNPDNSDVDKLFIQLVQTYNQLFEENPINASGVDAKAILSARLSKSRRLENLIAQLPGEKKNGLFGNLIALSLGLTPNFKSNFDLAEDAKLQLSKDTYDDDLDNLLAQIGDQYADLFLAAKNLSDAILLSDILRVNTEITKAPLSASMIKRYDEHHQDLTLLKALVRQQLPEKYKEIFFDQSKNGYAGYIDGGASQEEFYKFIKPILEKMDGTEELLVKLNREDLLRKQRTFDNGSIPHQIHLGELHAILRRQEDFYPFLKDNREKIEKILTFRIPYYVGPLARGNSRFAWMTRKSEETITPWNFEEVVDKGASAQSFIERMTNFDKNLPNEKVLPKHSLLYEYFTVYNELTKVKYVTEGMRKPAFLSGEQKKAIVDLLFKTNRKVTVKQLKEDYFKKIECFDSVEISGVEDRFNASLGTYHDLLKIIKDKDFLDNEENEDILEDIVLTLTLFEDREMIEERLKTYAHLFDDKVMKQLKRRRYTGWGRLSRKLINGIRDKQSGKTILDFLKSDGFANRNFMQLIHDDSLTFKEDIQKAQVSGQGDSLHEHIANLAGSPAIKKGILQTVKVVDELVKVMGRHKPENIVIEMARENQTTQKGQKNSRERMKRIEEGIKELGSQILKEHPVENTQLQNEKLYLYYLQNGRDMYVDQELDINRLSDYDVDHIVPQSFLKDDSIDNKVLTRSDKNRGKSDNVPSEEVVKKMKNYWRQLLNAKLITQRKFDNLTKAERGGLSELDKAGFIKRQLVETRQITKHVAQILDSRMNTKYDENDKLIREVKVITLKSKLVSDFRKDFQFYKVREINNYHHAHDAYLNAVVGTALIKKYPKLESEFVYGDYKVYDVRKMIAKSEQEIGKATAKYFFYSNIMNFFKTEITLANGEIRKRPLIETNGETGEIVWDKGRDFATVRKVLSMPQVNIVKKTEVQTGGFSKESILPKRNSDKLIARKKDWDPKKYGGFDSPTVAYSVLVVAKVEKGKSKKLKSVKELLGITIMERSSFEKNPIDFLEAKGYKEVKKDLIIKLPKYSLFELENGRKRMLASAGELQKGNELALPSKYVNFLYLASHYEKLKGSPEDNEQKQLFVEQHKHYLDEIIEQISEFSKRVILADANLDKVLSAYNKHRDKPIREQAENIIHLFTLTNLGAPAAFKYFDTTIDRKRYTSTKEVLDATLIHQSITGLYETRIDLSQLGGDSGGSGGSGGSTNLSDIIEKETGKQLVIQESILMLPEEVEEVIGNKPESDILVHTAYDESTDENVMLLTSDAPEYKPWALVIQDSNGENKIKMLSGGSGGSGGSTNLSDIIEKETGKQLVIQESILMLPEEVEEVIGNKPESDILVHTAYDESTDENVMLLTSDAPEYKPWALVIQDSNGENKIKMLSGGSKRTADGSEFEPKKKRKV

SEQ ID NO: 560 - protein, 1824 aa, synthetic construct
MKRTADGSEFESPKKKRKVSEASPASGPRHLMDPHIFTSNFNNGIGRHKTYLCYEVERLDNGTSVKMDQHRGFLHNQAKNLLCGFYGRHAELRFLDLVPSLQLDPAQIYRVTWFISWSPCFSWGCAGEVRAFLQENTHVRLRIFAARIYDYDPLYKEALQMLRDAGAQVSIMTYDEFKHCWDTFVDHQGCPFQPWDGLDEHSQALSGRLRAILQNQGNSGGSSGGSSGSETPGTSESATPESSGGSSGGSDKKYSIGLAIGTNSVGWAVITDEYKVPSKKFKVLGNTDRHSIKKNLIGALLFDSGETAEATRLKRTARRRYTRRKNRICYLQEIFSNEMAKVDDSFFHRLEESFLVEEDKKHERHPIFGNIVDEVAYHEKYPTIYHLRKKLVDSTDKADLRLIYLALAHMIKFRGHFLIEGDLNPDNSDVDKLFIQLVQTYNQLFEENPINASGVDAKAILSARLSKSRRLENLIAQLPGEKKNGLFGNLIALSLGLTPNFKSNFDLAEDAKLQLSKDTYDDDLDNLLAQIGDQYADLFLAAKNLSDAILLSDILRVNTEITKAPLSASMIKRYDEHHQDLTLLKALVRQQLPEKYKEIFFDQSKNGYAGYIDGGASQEEFYKFIKPILEKMDGTEELLVKLNREDLLRKQRTFDNGSIPHQIHLGELHAILRRQEDFYPFLKDNREKIEKILTFRIPYYVGPLARGNSRFAWMTRKSEETITPWNFEEVVDKGASAQSFIERMTNFDKNLPNEKVLPKHSLLYEYFTVYNELTKVKYVTEGMRKPAFLSGEQKKAIVDLLFKTNRKVTVKQLKEDYFKKIECFDSVEISGVEDRFNASLGTYHDLLKIIKDKDFLDNEENEDILEDIVLTLTLFEDREMIEERLKTYAHLFDDKVMKQLKRRRYTGWGRLSRKLINGIRDKQSGKTILDFLKSDGFANRNFMQLIHDDSLTFKEDIQKAQVSGQGDSLHEHIANLAGSPAIKKGILQTVKVVDELVKVMGRHKPENIVIEMARENQTTQKGQKNSRERMKRIEEGIKELGSQILKEHPVENTQLQNEKLYLYYLQNGRDMYVDQELDINRLSDYDVDHIVPQSFLKDDSIDNKVLTRSDKNRGKSDNVPSEEVVKKMKNYWRQLLNAKLITQRKFDNLTKAERGGLSELDKAGFIKRQLVETRQITKHVAQILDSRMNTKYDENDKLIREVKVITLKSKLVSDFRKDFQFYKVREINNYHHAHDAYLNAVVGTALIKKYPKLESEFVYGDYKVYDVRKMIAKSEQEIGKATAKYFFYSNIMNFFKTEITLANGEIRKRPLIETNGETGEIVWDKGRDFATVRKVLSMPQVNIVKKTEVQTGGFSKESILPKRNSDKLIARKKDWDPKKYGGFDSPTVAYSVLVVAKVEKGKSKKLKSVKELLGITIMERSSFEKNPIDFLEAKGYKEVKKDLIIKLPKYSLFELENGRKRMLASAGELQKGNELALPSKYVNFLYLASHYEKLKGSPEDNEQKQLFVEQHKHYLDEIIEQISEFSKRVILADANLDKVLSAYNKHRDKPIREQAENIIHLFTLTNLGAPAAFKYFDTTIDRKRYTSTKEVLDATLIHQSITGLYETRIDLSQLGGDSGGSGGSGGSTNLSDIIEKETGKQLVIQESILMLPEEVEEVIGNKPESDILVHTAYDESTDENVMLLTSDAPEYKPWALVIQDSNGENKIKMLSGGSGGSGGSTNLSDIIEKETGKQLVIQESILMLPEEVEEVIGNKPESDILVHTAYDESTDENVMLLTSDAPEYKPWALVIQDSNGENKIKMLSGGSKRTADGSEFEPKKKRKV

SEQ ID NO: 561 - protein, 2006 aa, synthetic construct
MKRTADGSEFESPKKKRKVNPQIRNPMERMYRDTFYDNFENEPILYGRSYTWLCYEVKIKRGRSNLLWDTGVFRGQVYFKPQYHAEMCFLSWFCGNQLPAYKCFQITWFVSWTPCPDCVAKLAEFLSEHPNVTLTISAARLYYYWERDYRRALCRLSQAGARVTIMDYEEFAYCWENFVYNEGQQFMPWYKFDENYAFLHRTLKEILRYLMDPDTFTFNFNNDPLVLRRRQTYLCYEVERLDNGTWVLMDQHMGFLCNEAKNLLCGFYGRHAELRFLDLVPSLQLDPAQIYRVTWFISWSPCFSWGCAGEVRAFLQENTHVRLRIFAARIYDYDPLYKEALQMLRDAGAQVSIMTYDEFEYCWDTFVYRQGCPFQPWDGLEEHSQALSGRLRAILQNQGNSGGSSGGSSGSETPGTSESATPESSGGSSGGSDKKYSIGLAIGTNSVGWAVITDEYKVPSKKFKVLGNTDRHSIKKNLIGALLFDSGETAEATRLKRTARRRYTRRKNRICYLQEIFSNEMAKVDDSFFHRLEESFLVEEDKKHERHPIFGNIVDEVAYHEKYPTIYHLRKKLVDSTDKADLRLIYLALAHMIKFRGHFLIEGDLNPDNSDVDKLFIQLVQTYNQLFEENPINASGVDAKAILSARLSKSRRLENLIAQLPGEKKNGLFGNLIALSLGLTPNFKSNFDLAEDAKLQLSKDTYDDDLDNLLAQIGDQYADLFLAAKNLSDAILLSDILRVNTEITKAPLSASMIKRYDEHHQDLTLLKALVRQQLPEKYKEIFFDQSKNGYAGYIDGGASQEEFYKFIKPILEKMDGTEELLVKLNREDLLRKQRTFDNGSIPHQIHLGELHAILRRQEDFYPFLKDNREKIEKILTFRIPYYVGPLARGNSRFAWMTRKSEETITPWNFEEVVDKGASAQSFIERMTNFDKNLPNEKVLPKHSLLYEYFTVYNELTKVKYVTEGMRKPAFLSGEQKKAIVDLLFKTNRKVTVKQLKEDYFKKIECFDSVEISGVEDRFNASLGTYHDLLKIIKDKDFLDNEENEDILEDIVLTLTLFEDREMIEERLKTYAHLFDDKVMKQLKRRRYTGWGRLSRKLINGIRDKQSGKTILDFLKSDGFANRNFMQLIHDDSLTFKEDIQKAQVSGQGDSLHEHIANLAGSPAIKKGILQTVKVVDELVKVMGRHKPENIVIEMARENQTTQKGQKNSRERMKRIEEGIKELGSQILKEHPVENTQLQNEKLYLYYLQNGRDMYVDQELDINRLSDYDVDHIVPQSFLKDDSIDNKVLTRSDKNRGKSDNVPSEEVVKKMKNYWRQLLNAKLITQRKFDNLTKAERGGLSELDKAGFIKRQLVETRQITKHVAQILDSRMNTKYDENDKLIREVKVITLKSKLVSDFRKDFQFYKVREINNYHHAHDAYLNAVVGTALIKKYPKLESEFVYGDYKVYDVRKMIAKSEQEIGKATAKYFFYSNIMNFFKTEITLANGEIRKRPLIETNGETGEIVWDKGRDFATVRKVLSMPQVNIVKKTEVQTGGFSKESILPKRNSDKLIARKKDWDPKKYGGFDSPTVAYSVLVVAKVEKGKSKKLKSVKELLGITIMERSSFEKNPIDFLEAKGYKEVKKDLIIKLPKYSLFELENGRKRMLASAGELQKGNELALPSKYVNFLYLASHYEKLKGSPEDNEQKQLFVEQHKHYLDEIIEQISEFSKRVILADANLDKVLSAYNKHRDKPIREQAENIIHLFTLTNLGAPAAFKYFDTTIDRKRYTSTKEVLDATLIHQSITGLYETRIDLSQLGGDSGGSGGSGGSTNLSDIIEKETGKQLVIQESILMLPEEVEEVIGNKPESDILVHTAYDESTDENVMLLTSDAPEYKPWALVIQDSNGENKIKMLSGGSGGSGGSTNLSDIIEKETGKQLVIQESILMLPEEVEEVIGNKPESDILVHTAYDESTDENVMLLTSDAPEYKPWALVIQDSNGENKIKMLSGGSKRTADGSEFEPKKKRKV

SEQ ID NO: 562 - protein, 2008 aa, synthetic construct
MKRTADGSEFESPKKKRKVKPHFRNTVERMYRDTFSYNFYNRPILSRRNTVWLCYEVKTKGPSRPPLDAKIFRGQVYSELKYHPEMRFFHWFSKWRKLHRDQEYEVTWYISWSPCTKCTRDMATFLAEDPKVTLTIFVARLYYFWDPDYQEALRSLCQKRDGPRATMKIMNYDEFQHCWSKFVYSQRELFEPWNNLPKYYILLHIMLGEILRHSMDPPTFTFNFNNEPWVRGRHETYLCYEVERMHNDTWVLLNQRRGFLCNQAPHKHGFLEGRHAELCFLDVIPFWKLDLDQDYRVTCFTSWSPCFSCAQEMAKFISKNKHVSLCIFTARIYDDQGRCQEGLRTLAEAGAKISIMTYSEFKHCWDTFVDHQGCPFQPWDGLDEHSQDLSGRLRAILQNQENSGGSSGGSSGSETPGTSESATPESSGGSSGGSDKKYSIGLAIGTNSVGWAVITDEYKVPSKKFKVLGNTDRHSIKKNLIGALLFDSGETAEATRLKRTARRRYTRRKNRICYLQEIFSNEMAKVDDSFFHRLEESFLVEEDKKHERHPIFGNIVDEVAYHEKYPTIYHLRKKLVDSTDKADLRLIYLALAHMIKFRGHFLIEGDLNPDNSDVDKLFIQLVQTYNQLFEENPINASGVDAKAILSARLSKSRRLENLIAQLPGEKKNGLFGNLIALSLGLTPNFKSNFDLAEDAKLQLSKDTYDDDLDNLLAQIGDQYADLFLAAKNLSDAILLSDILRVNTEITKAPLSASMIKRYDEHHQDLTLLKALVRQQLPEKYKEIFFDQSKNGYAGYIDGGASQEEFYKFIKPILEKMDGTEELLVKLNREDLLRKQRTFDNGSIPHQIHLGELHAILRRQEDFYPFLKDNREKIEKILTFRIPYYVGPLARGNSRFAWMTRKSEETITPWNFEEVVDKGASAQSFIERMTNFDKNLPNEKVLPKHSLLYEYFTVYNELTKVKYVTEGMRKPAFLSGEQKKAIVDLLFKTNRKVTVKQLKEDYFKKIECFDSVEISGVEDRFNASLGTYHDLLKIIKDKDFLDNEENEDILEDIVLTLTLFEDREMIEERLKTYAHLFDDKVMKQLKRRRYTGWGRLSRKLINGIRDKQSGKTILDFLKSDGFANRNFMQLIHDDSLTFKEDIQKAQVSGQGDSLHEHIANLAGSPAIKKGILQTVKVVDELVKVMGRHKPENIVIEMARENQTTQKGQKNSRERMKRIEEGIKELGSQILKEHPVENTQLQNEKLYLYYLQNGRDMYVDQELDINRLSDYDVDHIVPQSFLKDDSIDNKVLTRSDKNRGKSDNVPSEEVVKKMKNYWRQLLNAKLITQRKFDNLTKAERGGLSELDKAGFIKRQLVETRQITKHVAQILDSRMNTKYDENDKLIREVKVITLKSKLVSDFRKDFQFYKVREINNYHHAHDAYLNAVVGTALIKKYPKLESEFVYGDYKVYDVRKMIAKSEQEIGKATAKYFFYSNIMNFFKTEITLANGEIRKRPLIETNGETGEIVWDKGRDFATVRKVLSMPQVNIVKKTEVQTGGFSKESILPKRNSDKLIARKKDWDPKKYGGFDSPTVAYSVLVVAKVEKGKSKKLKSVKELLGITIMERSSFEKNPIDFLEAKGYKEVKKDLIIKLPKYSLFELENGRKRMLASAGELQKGNELALPSKYVNFLYLASHYEKLKGSPEDNEQKQLFVEQHKHYLDEIIEQISEFSKRVILADANLDKVLSAYNKHRDKPIREQAENIIHLFTLTNLGAPAAFKYFDTTIDRKRYTSTKEVLDATLIHQSITGLYETRIDLSQLGGDSGGSGGSGGSTNLSDIIEKETGKQLVIQESILMLPEEVEEVIGNKPESDILVHTAYDESTDENVMLLTSDAPEYKPWALVIQDSNGENKIKMLSGGSGGSGGSTNLSDIIEKETGKQLVIQESILMLPEEVEEVIGNKPESDILVHTAYDESTDENVMLLTSDAPEYKPWALVIQDSNGENKIKMLSGGSKRTADGSEFEPKKKRKV

SEQ ID NO: 563 - protein, 1822 aa, synthetic construct
MKRTADGSEFESPKKKRKVDSLLMNRRKFLYQFKNVRWAKGRRETYLCYVVKRRDSATSFSLDFGYLRNKNGCHVELLFLRYISDWDLDPGRCYRVTWFTSWSPCYDCARHVADFLRGNPNLSLRIFTARLYFCEDRKAEPEGLRRLHRAGVQIAIMTFKDYFYCWNTFVENHERTFKAWEGLHENSVRLSRQLRRILLPLYEVDDLRDAFRTLGLSGGSSGGSSGSETPGTSESATPESSGGSSGGSDKKYSIGLAIGTNSVGWAVITDEYKVPSKKFKVLGNTDRHSIKKNLIGALLFDSGETAEATRLKRTARRRYTRRKNRICYLQEIFSNEMAKVDDSFFHRLEESFLVEEDKKHERHPIFGNIVDEVAYHEKYPTIYHLRKKLVDSTDKADLRLIYLALAHMIKFRGHFLIEGDLNPDNSDVDKLFIQLVQTYNQLFEENPINASGVDAKAILSARLSKSRRLENLIAQLPGEKKNGLFGNLIALSLGLTPNFKSNFDLAEDAKLQLSKDTYDDDLDNLLAQIGDQYADLFLAAKNLSDAILLSDILRVNTEITKAPLSASMIKRYDEHHQDLTLLKALVRQQLPEKYKEIFFDQSKNGYAGYIDGGASQEEFYKFIKPILEKMDGTEELLVKLNREDLLRKQRTFDNGSIPHQIHLGELHAILRRQEDFYPFLKDNREKIEKILTFRIPYYVGPLARGNSRFAWMTRKSEETITPWNFEEVVDKGASAQSFIERMTNFDKNLPNEKVLPKHSLLYEYFTVYNELTKVKYVTEGMRKPAFLSGEQKKAIVDLLFKTNRKVTVKQLKEDYFKKIECFDSVEISGVEDRFNASLGTYHDLLKIIKDKDFLDNEENEDILEDIVLTLTLFEDREMIEERLKTYAHLFDDKVMKQLKRRRYTGWGRLSRKLINGIRDKQSGKTILDFLKSDGFANRNFMQLIHDDSLTFKEDIQKAQVSGQGDSLHEHIANLAGSPAIKKGILQTVKVVDELVKVMGRHKPENIVIEMARENQTTQKGQKNSRERMKRIEEGIKELGSQILKEHPVENTQLQNEKLYLYYLQNGRDMYVDQELDINRLSDYDVDHIVPQSFLKDDSIDNKVLTRSDKNRGKSDNVPSEEVVKKMKNYWRQLLNAKLITQRKFDNLTKAERGGLSELDKAGFIKRQLVETRQITKHVAQILDSRMNTKYDENDKLIREVKVITLKSKLVSDFRKDFQFYKVREINNYHHAHDAYLNAVVGTALIKKYPKLESEFVYGDYKVYDVRKMIAKSEQEIGKATAKYFFYSNIMNFFKTEITLANGEIRKRPLIETNGETGEIVWDKGRDFATVRKVLSMPQVNIVKKTEVQTGGFSKESILPKRNSDKLIARKKDWDPKKYGGFDSPTVAYSVLVVAKVEKGKSKKLKSVKELLGITIMERSSFEKNPIDFLEAKGYKEVKKDLIIKLPKYSLFELENGRKRMLASAGELQKGNELALPSKYVNFLYLASHYEKLKGSPEDNEQKQLFVEQHKHYLDEIIEQISEFSKRVILADANLDKVLSAYNKHRDKPIREQAENIIHLFTLTNLGAPAAFKYFDTTIDRKRYTSTKEVLDATLIHQSITGLYETRIDLSQLGGDSGGSGGSGGSTNLSDIIEKETGKQLVIQESILMLPEEVEEVIGNKPESDILVHTAYDESTDENVMLLTSDAPEYKPWALVIQDSNGENKIKMLSGGSGGSGGSTNLSDIIEKETGKQLVIQESILMLPEEVEEVIGNKPESDILVHTAYDESTDENVMLLTSDAPEYKPWALVIQDSNGENKIKMLSGGSKRTADGSEFEPKKKRKV

SEQ ID NO: 564 - protein, 1832 aa, synthetic construct
MKRTADGSEFESPKKKRKVTDAEYVRIHEKLDIYTFKKQFFNNKKSVSHRCYVLFELKRRGERRACFWGYAVNKPQSGTERGIHAEIFSIRKVEEYLRDNPGQFTINWYSSWSPCADCAEKILEWYNQELRGNGHTLKIWACKLYYEKNARNQIGLWNLRDNGVGLNVMVSEHYQCCRKIFIQSSHNQLNENRWLEKTLKRAEKRRSELSIMIQVKILHTTKSPAVSGGSSGGSSGSETPGTSESATPESSGGSSGGSDKKYSIGLAIGTNSVGWAVITDEYKVPSKKFKVLGNTDRHSIKKNLIGALLFDSGETAEATRLKRTARRRYTRRKNRICYLQEIFSNEMAKVDDSFFHRLEESFLVEEDKKHERHPIFGNIVDEVAYHEKYPTIYHLRKKLVDSTDKADLRLIYLALAHMIKFRGHFLIEGDLNPDNSDVDKLFIQLVQTYNQLFEENPINASGVDAKAILSARLSKSRRLENLIAQLPGEKKNGLFGNLIALSLGLTPNFKSNFDLAEDAKLQLSKDTYDDDLDNLLAQIGDQYADLFLAAKNLSDAILLSDILRVNTEITKAPLSASMIKRYDEHHQDLTLLKALVRQQLPEKYKEIFFDQSKNGYAGYIDGGASQEEFYKFIKPILEKMDGTEELLVKLNREDLLRKQRTFDNGSIPHQIHLGELHAILRRQEDFYPFLKDNREKIEKILTFRIPYYVGPLARGNSRFAWMTRKSEETITPWNFEEVVDKGASAQSFIERMTNFDKNLPNEKVLPKHSLLYEYFTVYNELTKVKYVTEGMRKPAFLSGEQKKAIVDLLFKTNRKVTVKQLKEDYFKKIECFDSVEISGVEDRFNASLGTYHDLLKIIKDKDFLDNEENEDILEDIVLTLTLFEDREMIEERLKTYAHLFDDKVMKQLKRRRYTGWGRLSRKLINGIRDKQSGKTILDFLKSDGFANRNFMQLIHDDSLTFKEDIQKAQVSGQGDSLHEHIANLAGSPAIKKGILQTVKVVDELVKVMGRHKPENIVIEMARENQTTQKGQKNSRERMKRIEEGIKELGSQILKEHPVENTQLQNEKLYLYYLQNGRDMYVDQELDINRLSDYDVDHIVPQSFLKDDSIDNKVLTRSDKNRGKSDNVPSEEVVKKMKNYWRQLLNAKLITQRKFDNLTKAERGGLSELDKAGFIKRQLVETRQITKHVAQILDSRMNTKYDENDKLIREVKVITLKSKLVSDFRKDFQFYKVREINNYHHAHDAYLNAVVGTALIKKYPKLESEFVYGDYKVYDVRKMIAKSEQEIGKATAKYFFYSNIMNFFKTEITLANGEIRKRPLIETNGETGEIVWDKGRDFATVRKVLSMPQVNIVKKTEVQTGGFSKESILPKRNSDKLIARKKDWDPKKYGGFDSPTVAYSVLVVAKVEKGKSKKLKSVKELLGITIMERSSFEKNPIDFLEAKGYKEVKKDLIIKLPKYSLFELENGRKRMLASAGELQKGNELALPSKYVNFLYLASHYEKLKGSPEDNEQKQLFVEQHKHYLDEIIEQISEFSKRVILADANLDKVLSAYNKHRDKPIREQAENIIHLFTLTNLGAPAAFKYFDTTIDRKRYTSTKEVLDATLIHQSITGLYETRIDLSQLGGDSGGSGGSGGSTNLSDIIEKETGKQLVIQESILMLPEEVEEVIGNKPESDILVHTAYDESTDENVMLLTSDAPEYKPWALVIQDSNGENKIKMLSGGSGGSGGSTNLSDIIEKETGKQLVIQESILMLPEEVEEVIGNKPESDILVHTAYDESTDENVMLLTSDAPEYKPWALVIQDSNGENKIKMLSGGSKRTADGSEFEPKKKRKV

SEQ ID NO: 565 - protein, 1786 aa, synthetic construct
MKRTADGSEFESPKKKRKVFERNYDPRELRKETYLLYEIKWGKSGKLWRHWCQNNRTQHAEVYFLENIFNARRFNPSTHCSITWYLSWSPCAECSQKIVDFLKEHPNVNLEIYVARLYYHEDERNRQGLRDLVNSGVTIRIMDLPDYNYCWKTFVSDQGGDEDYWPGHFAPWIKQYSLKLSGGSSGGSSGSETPGTSESATPESSGGSSGGSDKKYSIGLAIGTNSVGWAVITDEYKVPSKKFKVLGNTDRHSIKKNLIGALLFDSGETAEATRLKRTARRRYTRRKNRICYLQEIFSNEMAKVDDSFFHRLEESFLVEEDKKHERHPIFGNIVDEVAYHEKYPTIYHLRKKLVDSTDKADLRLIYLALAHMIKFRGHFLIEGDLNPDNSDVDKLFIQLVQTYNQLFEENPINASGVDAKAILSARLSKSRRLENLIAQLPGEKKNGLFGNLIALSLGLTPNFKSNFDLAEDAKLQLSKDTYDDDLDNLLAQIGDQYADLFLAAKNLSDAILLSDILRVNTEITKAPLSASMIKRYDEHHQDLTLLKALVRQQLPEKYKEIFFDQSKNGYAGYIDGGASQEEFYKFIKPILEKMDGTEELLVKLNREDLLRKQRTFDNGSIPHQIHLGELHAILRRQEDFYPFLKDNREKIEKILTFRIPYYVGPLARGNSRFAWMTRKSEETITPWNFEEVVDKGASAQSFIERMTNFDKNLPNEKVLPKHSLLYEYFTVYNELTKVKYVTEGMRKPAFLSGEQKKAIVDLLFKTNRKVTVKQLKEDYFKKIECFDSVEISGVEDRFNASLGTYHDLLKIIKDKDFLDNEENEDILEDIVLTLTLFEDREMIEERLKTYAHLFDDKVMKQLKRRRYTGWGRLSRKLINGIRDKQSGKTILDFLKSDGFANRNFMQLIHDDSLTFKEDIQKAQVSGQGDSLHEHIANLAGSPAIKKGILQTVKVVDELVKVMGRHKPENIVIEMARENQTTQKGQKNSRERMKRIEEGIKELGSQILKEHPVENTQLQNEKLYLYYLQNGRDMYVDQELDINRLSDYDVDHIVPQSFLKDDSIDNKVLTRSDKNRGKSDNVPSEEVVKKMKNYWRQLLNAKLITQRKFDNLTKAERGGLSELDKAGFIKRQLVETRQITKHVAQILDSRMNTKYDENDKLIREVKVITLKSKLVSDFRKDFQFYKVREINNYHHAHDAYLNAVVGTALIKKYPKLESEFVYGDYKVYDVRKMIAKSEQEIGKATAKYFFYSNIMNFFKTEITLANGEIRKRPLIETNGETGEIVWDKGRDFATVRKVLSMPQVNIVKKTEVQTGGFSKESILPKRNSDKLIARKKDWDPKKYGGFDSPTVAYSVLVVAKVEKGKSKKLKSVKELLGITIMERSSFEKNPIDFLEAKGYKEVKKDLIIKLPKYSLFELENGRKRMLASAGELQKGNELALPSKYVNFLYLASHYEKLKGSPEDNEQKQLFVEQHKHYLDEIIEQISEFSKRVILADANLDKVLSAYNKHRDKPIREQAENIIHLFTLTNLGAPAAFKYFDTTIDRKRYTSTKEVLDATLIHQSITGLYETRIDLSQLGGDSGGSGGSGGSTNLSDIIEKETGKQLVIQESILMLPEEVEEVIGNKPESDILVHTAYDESTDENVMLLTSDAPEYKPWALVIQDSNGENKIKMLSGGSGGSGGSTNLSDIIEKETGKQLVIQESILMLPEEVEEVIGNKPESDILVHTAYDESTDENVMLLTSDAPEYKPWALVIQDSNGENKIKMLSGGSKRTADGSEFEPKKKRKV

SEQ ID NO: 566 - protein, 1823 aa, synthetic construct
MKRTADGSEFESPKKKRKVEASPASGPRHLMDPHIFTSNFNNGIGRHKTYLCYEVERLDNGTSVKMDQHRGFLHGQAKNLLCGFYGRHAELRFLDLVPSLQLDPAQIYRVTWFISWSPCFSWGCAGEVRAFLQENTHVRLRIFAARIYDYDPLYKEALQMLRDAGAQVSIMTYDEFKHCWDTFVDHQGCPFQPWDGLDEHSQALSGRLRAILQNQGNSGGSSGGSSGSETPGTSESATPESSGGSSGGSDKKYSIGLAIGTNSVGWAVITDEYKVPSKKFKVLGNTDRHSIKKNLIGALLFDSGETAEATRLKRTARRRYTRRKNRICYLQEIFSNEMAKVDDSFFHRLEESFLVEEDKKHERHPIFGNIVDEVAYHEKYPTIYHLRKKLVDSTDKADLRLIYLALAHMIKFRGHFLIEGDLNPDNSDVDKLFIQLVQTYNQLFEENPINASGVDAKAILSARLSKSRRLENLIAQLPGEKKNGLFGNLIALSLGLTPNFKSNFDLAEDAKLQLSKDTYDDDLDNLLAQIGDQYADLFLAAKNLSDAILLSDILRVNTEITKAPLSASMIKRYDEHHQDLTLLKALVRQQLPEKYKEIFFDQSKNGYAGYIDGGASQEEFYKFIKPILEKMDGTEELLVKLNREDLLRKQRTFDNGSIPHQIHLGELHAILRRQEDFYPFLKDNREKIEKILTFRIPYYVGPLARGNSRFAWMTRKSEETITPWNFEEVVDKGASAQSFIERMTNFDKNLPNEKVLPKHSLLYEYFTVYNELTKVKYVTEGMRKPAFLSGEQKKAIVDLLFKTNRKVTVKQLKEDYFKKIECFDSVEISGVEDRFNASLGTYHDLLKIIKDKDFLDNEENEDILEDIVLTLTLFEDREMIEERLKTYAHLFDDKVMKQLKRRRYTGWGRLSRKLINGIRDKQSGKTILDFLKSDGFANRNFMQLIHDDSLTFKEDIQKAQVSGQGDSLHEHIANLAGSPAIKKGILQTVKVVDELVKVMGRHKPENIVIEMARENQTTQKGQKNSRERMKRIEEGIKELGSQILKEHPVENTQLQNEKLYLYYLQNGRDMYVDQELDINRLSDYDVDHIVPQSFLKDDSIDNKVLTRSDKNRGKSDNVPSEEVVKKMKNYWRQLLNAKLITQRKFDNLTKAERGGLSELDKAGFIKRQLVETRQITKHVAQILDSRMNTKYDENDKLIREVKVITLKSKLVSDFRKDFQFYKVREINNYHHAHDAYLNAVVGTALIKKYPKLESEFVYGDYKVYDVRKMIAKSEQEIGKATAKYFFYSNIMNFFKTEITLANGEIRKRPLIETNGETGEIVWDKGRDFATVRKVLSMPQVNIVKKTEVQTGGFSKESILPKRNSDKLIARKKDWDPKKYGGFDSPTVAYSVLVVAKVEKGKSKKLKSVKELLGITIMERSSFEKNPIDFLEAKGYKEVKKDLIIKLPKYSLFELENGRKRMLASAGELQKGNELALPSKYVNFLYLASHYEKLKGSPEDNEQKQLFVEQHKHYLDEIIEQISEFSKRVILADANLDKVLSAYNKHRDKPIREQAENIIHLFTLTNLGAPAAFKYFDTTIDRKRYTSTKEVLDATLIHQSITGLYETRIDLSQLGGDSGGSGGSGGSTNLSDIIEKETGKQLVIQESILMLPEEVEEVIGNKPESDILVHTAYDESTDENVMLLTSDAPEYKPWALVIQDSNGENKIKMLSGGSGGSGGSTNLSDIIEKETGKQLVIQESILMLPEEVEEVIGNKPESDILVHTAYDESTDENVMLLTSDAPEYKPWALVIQDSNGENKIKMLSGGSKRTADGSEFEPKKKRKV

SEQ ID NO: 567 - protein, 1853 aa, synthetic construct
MKRTADGSEFESPKKKRKVSSETGPVAVDPTLRRRIEPHEFEVFFDPRELAAETCLLYEINWGGRHSIWRHTSQNTNKHVEVNFIEKFTTERYFCPNTRCSITWFLSWSPCGECSRAITEFLSRYPHVTLFIYIARLYHLANPRNRQGLRDLISSGVTIQIMTEQESGYCWRNFVNYSPSNEAHWPRYPHLWVRLYVLELYCIILGLPPCLNILRRKQPQLTFFTIALQSCHYQRLPPHILWATGLKSGGSSGGSSGSETPGTSESATPESSGGSSGGSDKKYSIGLAIGTNSVGWAVITDEYKVPSKKFKVLGNTDRHSIKKNLIGALLFDSGETAEATRLKRTARRRYTRRKNRICYLQEIFSNEMAKVDDSFFHRLEESFLVEEDKKHERHPIFGNIVDEVAYHEKYPTIYHLRKKLVDSTDKADLRLIYLALAHMIKFRGHFLIEGDLNPDNSDVDKLFIQLVQTYNQLFEENPINASGVDAKAILSARLSKSRRLENLIAQLPGEKKNGLFGNLIALSLGLTPNFKSNFDLAEDAKLQLSKDTYDDDLDNLLAQIGDQYADLFLAAKNLSDAILLSDILRVNTEITKAPLSASMIKRYDEHHQDLTLLKALVRQQLPEKYKEIFFDQSKNGYAGYIDGGASQEEFYKFIKPILEKMDGTEELLVKLNREDLLRKQRTFDNGSIPHQIHLGELHAILRRQEDFYPFLKDNREKIEKILTFRIPYYVGPLARGNSRFAWMTRKSEETITPWNFEEVVDKGASAQSFIERMTNFDKNLPNEKVLPKHSLLYEYFTVYNELTKVKYVTEGMRKPAFLSGEQKKAIVDLLFKTNRKVTVKQLKEDYFKKIECFDSVEISGVEDRFNASLGTYHDLLKIIKDKDFLDNEENEDILEDIVLTLTLFEDREMIEERLKTYAHLFDDKVMKQLKRRRYTGWGRLSRKLINGIRDKQSGKTILDFLKSDGFANRNFMQLIHDDSLTFKEDIQKAQVSGQGDSLHEHIANLAGSPAIKKGILQTVKVVDELVKVMGRHKPENIVIEMARENQTTQKGQKNSRERMKRIEEGIKELGSQILKEHPVENTQLQNEKLYLYYLQNGRDMYVDQELDINRLSDYDVDHIVPQSFLKDDSIDNKVLTRSDKNRGKSDNVPSEEVVKKMKNYWRQLLNAKLITQRKFDNLTKAERGGLSELDKAGFIKRQLVETRQITKHVAQILDSRMNTKYDENDKLIREVKVITLKSKLVSDFRKDFQFYKVREINNYHHAHDAYLNAVVGTALIKKYPKLESEFVYGDYKVYDVRKMIAKSEQEIGKATAKYFFYSNIMNFFKTEITLANGEIRKRPLIETNGETGEIVWDKGRDFATVRKVLSMPQVNIVKKTEVQTGGFSKESILPKRNSDKLIARKKDWDPKKYGGFDSPTVAYSVLVVAKVEKGKSKKLKSVKELLGITIMERSSFEKNPIDFLEAKGYKEVKKDLIIKLPKYSLFELENGRKRMLASAGELQKGNELALPSKYVNFLYLASHYEKLKGSPEDNEQKQLFVEQHKHYLDEIIEQISEFSKRVILADANLDKVLSAYNKHRDKPIREQAENIIHLFTLTNLGAPAAFKYFDTTIDRKRYTSTKEVLDATLIHQSITGLYETRIDLSQLGGDSGGSGGSGGSTNLSDIIEKETGKQLVIQESILMLPEEVEEVIGNKPESDILVHTAYDESTDENVMLLTSDAPEYKPWALVIQDSNGENKIKMLSGGSGGSGGSTNLSDIIEKETGKQLVIQESILMLPEEVEEVIGNKPESDILVHTAYDESTDENVMLLTSDAPEYKPWALVIQDSNGENKIKMLSGGSKRTADGSEFEPKKKRKV

SEQ ID NO: 568 - protein, 1853 aa, synthetic construct
MKRTADGSEFESPKKKRKVSSETGPVAVDPTLRRRIEPHEFEVFFDPRELRKETCLLYEINWGGRHSIWRHTSQNTNKHVEVNFIEKFTTERYFCPNTRCSITWFLSWSPCGECSRAITEFLSRYPHVTLFIYIARLYHHADPRNRQGLRDLISSGVTIQIMTEQESGYCWRNFVNYSPSNEAHWPRYPHLWVRLYVLELYCIILGLPPCLNILRRKQPQLTFFTIALQSCHYQRLPPHILWATGLKSGGSSGGSSGSETPGTSESATPESSGGSSGGSDKKYSIGLAIGTNSVGWAVITDEYKVPSKKFKVLGNTDRHSIKKNLIGALLFDSGETAEATRLKRTARRRYTRRKNRICYLQEIFSNEMAKVDDSFFHRLEESFLVEEDKKHERHPIFGNIVDEVAYHEKYPTIYHLRKKLVDSTDKADLRLIYLALAHMIKFRGHFLIEGDLNPDNSDVDKLFIQLVQTYNQLFEENPINASGVDAKAILSARLSKSRRLENLIAQLPGEKKNGLFGNLIALSLGLTPNFKSNFDLAEDAKLQLSKDTYDDDLDNLLAQIGDQYADLFLAAKNLSDAILLSDILRVNTEITKAPLSASMIKRYDEHHQDLTLLKALVRQQLPEKYKEIFFDQSKNGYAGYIDGGASQEEFYKFIKPILEKMDGTEELLVKLNREDLLRKQRTFDNGSIPHQIHLGELHAILRRQEDFYPFLKDNREKIEKILTFRIPYYVGPLARGNSRFAWMTRKSEETITPWNFEEVVDKGASAQSFIERMTNFDKNLPNEKVLPKHSLLYEYFTVYNELTKVKYVTEGMRKPAFLSGEQKKAIVDLLFKTNRKVTVKQLKEDYFKKIECFDSVEISGVEDRFNASLGTYHDLLKIIKDKDFLDNEENEDILEDIVLTLTLFEDREMIEERLKTYAHLFDDKVMKQLKRRRYTGWGRLSRKLINGIRDKQSGKTILDFLKSDGFANRNFMQLIHDDSLTFKEDIQKAQVSGQGDSLHEHIANLAGSPAIKKGILQTVKVVDELVKVMGRHKPENIVIEMARENQTTQKGQKNSRERMKRIEEGIKELGSQILKEHPVENTQLQNEKLYLYYLQNGRDMYVDQELDINRLSDYDVDHIVPQSFLKDDSIDNKVLTRSDKNRGKSDNVPSEEVVKKMKNYWRQLLNAKLITQRKFDNLTKAERGGLSELDKAGFIKRQLVETRQITKHVAQILDSRMNTKYDENDKLIREVKVITLKSKLVSDFRKDFQFYKVREINNYHHAHDAYLNAVVGTALIKKYPKLESEFVYGDYKVYDVRKMIAKSEQEIGKATAKYFFYSNIMNFFKTEITLANGEIRKRPLIETNGETGEIVWDKGRDFATVRKVLSMPQVNIVKKTEVQTGGFSKESIRPKRNSDKLIARKKDWDPKKYGGFVSPTVAYSVLVVAKVEKGKSKKLKSVKELLGITIMERSSFEKNPIDFLEAKGYKEVKKDLIIKLPKYSLFELENGRKRMLASARFLQKGNELALPSKYVNFLYLASHYEKLKGSPEDNEQKQLFVEQHKHYLDEIIEQISEFSKRVILADANLDKVLSAYNKHRDKPIREQAENIIHLFTLTNLGAPRAFKYFDTTIDRKVYRSTKEVLDATLIHQSITGLYETRIDLSQLGGDSGGSGGSGGSTNLSDIIEKETGKQLVIQESILMLPEEVEEVIGNKPESDILVHTAYDESTDENVMLLTSDAPEYKPWALVIQDSNGENKIKMLSGGSGGSGGSTNLSDIIEKETGKQLVIQESILMLPEEVEEVIGNKPESDILVHTAYDESTDENVMLLTSDAPEYKPWALVIQDSNGENKIKMLSGGSKRTADGSEFEPKKKRKV

SEQ ID NO: 569 - protein, 1853 aa, synthetic construct
MKRTADGSEFESPKKKRKVSSETGPVAVDPTLRRRIEPHEFEVFFDPRELRKETCLLYEINWGGRHSIWRHTSQNTNKHVEVNFIEKFTTERYFCPNTRCSITWFLSYSPCGECSRAITEFLSRYPHVTLFIYIARLYHHADPENRQGLRDLISSGVTIQIMTEQESGYCWRNFVNYSPSNEAHWPRYPHLWVRLYVLELYCIILGLPPCLNILRRKQPQLTFFTIALQSCHYQRLPPHILWATGLKSGGSSGGSSGSETPGTSESATPESSGGSSGGSDKKYSIGLAIGTNSVGWAVITDEYKVPSKKFKVLGNTDRHSIKKNLIGALLFDSGETAEATRLKRTARRRYTRRKNRICYLQEIFSNEMAKVDDSFFHRLEESFLVEEDKKHERHPIFGNIVDEVAYHEKYPTIYHLRKKLVDSTDKADLRLIYLALAHMIKFRGHFLIEGDLNPDNSDVDKLFIQLVQTYNQLFEENPINASGVDAKAILSARLSKSRRLENLIAQLPGEKKNGLFGNLIALSLGLTPNFKSNFDLAEDAKLQLSKDTYDDDLDNLLAQIGDQYADLFLAAKNLSDAILLSDILRVNTEITKAPLSASMIKRYDEHHQDLTLLKALVRQQLPEKYKEIFFDQSKNGYAGYIDGGASQEEFYKFIKPILEKMDGTEELLVKLNREDLLRKQRTFDNGSIPHQIHLGELHAILRRQEDFYPFLKDNREKIEKILTFRIPYYVGPLARGNSRFAWMTRKSEETITPWNFEEVVDKGASAQSFIERMTNFDKNLPNEKVLPKHSLLYEYFTVYNELTKVKYVTEGMRKPAFLSGEQKKAIVDLLFKTNRKVTVKQLKEDYFKKIECFDSVEISGVEDRFNASLGTYHDLLKIIKDKDFLDNEENEDILEDIVLTLTLFEDREMIEERLKTYAHLFDDKVMKQLKRRRYTGWGRLSRKLINGIRDKQSGKTILDFLKSDGFANRNFMQLIHDDSLTFKEDIQKAQVSGQGDSLHEHIANLAGSPAIKKGILQTVKVVDELVKVMGRHKPENIVIEMARENQTTQKGQKNSRERMKRIEEGIKELGSQILKEHPVENTQLQNEKLYLYYLQNGRDMYVDQELDINRLSDYDVDHIVPQSFLKDDSIDNKVLTRSDKNRGKSDNVPSEEVVKKMKNYWRQLLNAKLITQRKFDNLTKAERGGLSELDKAGFIKRQLVETRQITKHVAQILDSRMNTKYDENDKLIREVKVITLKSKLVSDFRKDFQFYKVREINNYHHAHDAYLNAVVGTALIKKYPKLESEFVYGDYKVYDVRKMIAKSEQEIGKATAKYFFYSNIMNFFKTEITLANGEIRKRPLIETNGETGEIVWDKGRDFATVRKVLSMPQVNIVKKTEVQTGGFSKESIRPKRNSDKLIARKKDWDPKKYGGFVSPTVAYSVLVVAKVEKGKSKKLKSVKELLGITIMERSSFEKNPIDFLEAKGYKEVKKDLIIKLPKYSLFELENGRKRMLASARFLQKGNELALPSKYVNFLYLASHYEKLKGSPEDNEQKQLFVEQHKHYLDEIIEQISEFSKRVILADANLDKVLSAYNKHRDKPIREQAENIIHLFTLTNLGAPRAFKYFDTTIDRKVYRSTKEVLDATLIHQSITGLYETRIDLSQLGGDSGGSGGSGGSTNLSDIIEKETGKQLVIQESILMLPEEVEEVIGNKPESDILVHTAYDESTDENVMLLTSDAPEYKPWALVIQDSNGENKIKMLSGGSGGSGGSTNLSDIIEKETGKQLVIQESILMLPEEVEEVIGNKPESDILVHTAYDESTDENVMLLTSDAPEYKPWALVIQDSNGENKIKMLSGGSKRTADGSEFEPKKKRKV

SEQ ID NO: 570 - protein, 1853 aa, synthetic construct
MKRTADGSEFESPKKKRKVSSETGPVAVDPTLRRRIEPHEFEVFFDPRELRKETCLLYEINWGGRHSIWRHTSQNTNKHVEVNFIEKFTTERYFCPNTRCSITWFLSYSPCGECSRAITEFLSRYPHVTLFIYIARLYHHADPRNRQGLEDLISSGVTIQIMTEQESGYCWRNFVNYSPSNEAHWPRYPHLWVRLYVLELYCIILGLPPCLNILRRKQPQLTFFTIALQSCHYQRLPPHILWATGLKSGGSSGGSSGSETPGTSESATPESSGGSSGGSDKKYSIGLAIGTNSVGWAVITDEYKVPSKKFKVLGNTDRHSIKKNLIGALLFDSGETAEATRLKRTARRRYTRRKNRICYLQEIFSNEMAKVDDSFFHRLEESFLVEEDKKHERHPIFGNIVDEVAYHEKYPTIYHLRKKLVDSTDKADLRLIYLALAHMIKFRGHFLIEGDLNPDNSDVDKLFIQLVQTYNQLFEENPINASGVDAKAILSARLSKSRRLENLIAQLPGEKKNGLFGNLIALSLGLTPNFKSNFDLAEDAKLQLSKDTYDDDLDNLLAQIGDQYADLFLAAKNLSDAILLSDILRVNTEITKAPLSASMIKRYDEHHQDLTLLKALVRQQLPEKYKEIFFDQSKNGYAGYIDGGASQEEFYKFIKPILEKMDGTEELLVKLNREDLLRKQRTFDNGSIPHQIHLGELHAILRRQEDFYPFLKDNREKIEKILTFRIPYYVGPLARGNSRFAWMTRKSEETITPWNFEEVVDKGASAQSFIERMTNFDKNLPNEKVLPKHSLLYEYFTVYNELTKVKYVTEGMRKPAFLSGEQKKAIVDLLFKTNRKVTVKQLKEDYFKKIECFDSVEISGVEDRFNASLGTYHDLLKIIKDKDFLDNEENEDILEDIVLTLTLFEDREMIEERLKTYAHLFDDKVMKQLKRRRYTGWGRLSRKLINGIRDKQSGKTILDFLKSDGFANRNFMQLIHDDSLTFKEDIQKAQVSGQGDSLHEHIANLAGSPAIKKGILQTVKVVDELVKVMGRHKPENIVIEMARENQTTQKGQKNSRERMKRIEEGIKELGSQILKEHPVENTQLQNEKLYLYYLQNGRDMYVDQELDINRLSDYDVDHIVPQSFLKDDSIDNKVLTRSDKNRGKSDNVPSEEVVKKMKNYWRQLLNAKLITQRKFDNLTKAERGGLSELDKAGFIKRQLVETRQITKHVAQILDSRMNTKYDENDKLIREVKVITLKSKLVSDFRKDFQFYKVREINNYHHAHDAYLNAVVGTALIKKYPKLESEFVYGDYKVYDVRKMIAKSEQEIGKATAKYFFYSNIMNFFKTEITLANGEIRKRPLIETNGETGEIVWDKGRDFATVRKVLSMPQVNIVKKTEVQTGGFSKESIRPKRNSDKLIARKKDWDPKKYGGFVSPTVAYSVLVVAKVEKGKSKKLKSVKELLGITIMERSSFEKNPIDFLEAKGYKEVKKDLIIKLPKYSLFELENGRKRMLASARFLQKGNELALPSKYVNFLYLASHYEKLKGSPEDNEQKQLFVEQHKHYLDEIIEQISEFSKRVILADANLDKVLSAYNKHRDKPIREQAENIIHLFTLTNLGAPRAFKYFDTTIDRKVYRSTKEVLDATLIHQSITGLYETRIDLSQLGGDSGGSGGSGGSTNLSDIIEKETGKQLVIQESILMLPEEVEEVIGNKPESDILVHTAYDESTDENVMLLTSDAPEYKPWALVIQDSNGENKIKMLSGGSGGSGGSTNLSDIIEKETGKQLVIQESILMLPEEVEEVIGNKPESDILVHTAYDESTDENVMLLTSDAPEYKPWALVIQDSNGENKIKMLSGGSKRTADGSEFEPKKKRKV

SEQ ID NO: 571 - protein, 1853 aa, synthetic construct
MKRTADGSEFESPKKKRKVSSETGPVAVDPTLRRRIEPHEFEVFFDPRELRKETCLLYEINWGGRHSIWRHTSQNTNKHVEVNFIEKFTTERYFCPNTRCSITWFLSYSPCGECSRAITEFLSRYPHVTLFIYIARLYHHADPENRQGLEDLISSGVTIQIMTEQESGYCWRNFVNYSPSNEAHWPRYPHLWVRLYVLELYCIILGLPPCLNILRRKQPQLTFFTIALQSCHYQRLPPHILWATGLKSGGSSGGSSGSETPGTSESATPESSGGSSGGSDKKYSIGLAIGTNSVGWAVITDEYKVPSKKFKVLGNTDRHSIKKNLIGALLFDSGETAEATRLKRTARRRYTRRKNRICYLQEIFSNEMAKVDDSFFHRLEESFLVEEDKKHERHPIFGNIVDEVAYHEKYPTIYHLRKKLVDSTDKADLRLIYLALAHMIKFRGHFLIEGDLNPDNSDVDKLFIQLVQTYNQLFEENPINASGVDAKAILSARLSKSRRLENLIAQLPGEKKNGLFGNLIALSLGLTPNFKSNFDLAEDAKLQLSKDTYDDDLDNLLAQIGDQYADLFLAAKNLSDAILLSDILRVNTEITKAPLSASMIKRYDEHHQDLTLLKALVRQQLPEKYKEIFFDQSKNGYAGYIDGGASQEEFYKFIKPILEKMDGTEELLVKLNREDLLRKQRTFDNGSIPHQIHLGELHAILRRQEDFYPFLKDNREKIEKILTFRIPYYVGPLARGNSRFAWMTRKSEETITPWNFEEVVDKGASAQSFIERMTNFDKNLPNEKVLPKHSLLYEYFTVYNELTKVKYVTEGMRKPAFLSGEQKKAIVDLLFKTNRKVTVKQLKEDYFKKIECFDSVEISGVEDRFNASLGTYHDLLKIIKDKDFLDNEENEDILEDIVLTLTLFEDREMIEERLKTYAHLFDDKVMKQLKRRRYTGWGRLSRKLINGIRDKQSGKTILDFLKSDGFANRNFMQLIHDDSLTFKEDIQKAQVSGQGDSLHEHIANLAGSPAIKKGILQTVKVVDELVKVMGRHKPENIVIEMARENQTTQKGQKNSRERMKRIEEGIKELGSQILKEHPVENTQLQNEKLYLYYLQNGRDMYVDQELDINRLSDYDVDHIVPQSFLKDDSIDNKVLTRSDKNRGKSDNVPSEEVVKKMKNYWRQLLNAKLITQRKFDNLTKAERGGLSELDKAGFIKRQLVETRQITKHVAQILDSRMNTKYDENDKLIREVKVITLKSKLVSDFRKDFQFYKVREINNYHHAHDAYLNAVVGTALIKKYPKLESEFVYGDYKVYDVRKMIAKSEQEIGKATAKYFFYSNIMNFFKTEITLANGEIRKRPLIETNGETGEIVWDKGRDFATVRKVLSMPQVNIVKKTEVQTGGFSKESIRPKRNSDKLIARKKDWDPKKYGGFVSPTVAYSVLVVAKVEKGKSKKLKSVKELLGITIMERSSFEKNPIDFLEAKGYKEVKKDLIIKLPKYSLFELENGRKRMLASARFLQKGNELALPSKYVNFLYLASHYEKLKGSPEDNEQKQLFVEQHKHYLDEIIEQISEFSKRVILADANLDKVLSAYNKHRDKPIREQAENIIHLFTLTNLGAPRAFKYFDTTIDRKVYRSTKEVLDATLIHQSITGLYETRIDLSQLGGDSGGSGGSGGSTNLSDIIEKETGKQLVIQESILMLPEEVEEVIGNKPESDILVHTAYDESTDENVMLLTSDAPEYKPWALVIQDSNGENKIKMLSGGSGGSGGSTNLSDIIEKETGKQLVIQESILMLPEEVEEVIGNKPESDILVHTAYDESTDENVMLLTSDAPEYKPWALVIQDSNGENKIKMLSGGSKRTADGSEFEPKKKRKV

SEQ ID NO: 572 - protein, 1853 aa, synthetic construct
MKRTADGSEFESPKKKRKVSSETGPVAVDPTLRRRIEPHEFEVFFDPRELRKETCLLYEINWGGRHSIWRHTSQNTNKHVEVNFIEKFTTERYFCPNTRCSITWFLSWSPCGECSRAITEFLSRYPHVTLFIYIARLYHHADPENRQGLEDLISSGVTIQIMTEQESGYCWRNFVNYSPSNEAHWPRYPHLWVRLYVLELYCIILGLPPCLNILRRKQPQLTFFTIALQSCHYQRLPPHILWATGLKSGGSSGGSSGSETPGTSESATPESSGGSSGGSDKKYSIGLAIGTNSVGWAVITDEYKVPSKKFKVLGNTDRHSIKKNLIGALLFDSGETAEATRLKRTARRRYTRRKNRICYLQEIFSNEMAKVDDSFFHRLEESFLVEEDKKHERHPIFGNIVDEVAYHEKYPTIYHLRKKLVDSTDKADLRLIYLALAHMIKFRGHFLIEGDLNPDNSDVDKLFIQLVQTYNQLFEENPINASGVDAKAILSARLSKSRRLENLIAQLPGEKKNGLFGNLIALSLGLTPNFKSNFDLAEDAKLQLSKDTYDDDLDNLLAQIGDQYADLFLAAKNLSDAILLSDILRVNTEITKAPLSASMIKRYDEHHQDLTLLKALVRQQLPEKYKEIFFDQSKNGYAGYIDGGASQEEFYKFIKPILEKMDGTEELLVKLNREDLLRKQRTFDNGSIPHQIHLGELHAILRRQEDFYPFLKDNREKIEKILTFRIPYYVGPLARGNSRFAWMTRKSEETITPWNFEEVVDKGASAQSFIERMTNFDKNLPNEKVLPKHSLLYEYFTVYNELTKVKYVTEGMRKPAFLSGEQKKAIVDLLFKTNRKVTVKQLKEDYFKKIECFDSVEISGVEDRFNASLGTYHDLLKIIKDKDFLDNEENEDILEDIVLTLTLFEDREMIEERLKTYAHLFDDKVMKQLKRRRYTGWGRLSRKLINGIRDKQSGKTILDFLKSDGFANRNFMQLIHDDSLTFKEDIQKAQVSGQGDSLHEHIANLAGSPAIKKGILQTVKVVDELVKVMGRHKPENIVIEMARENQTTQKGQKNSRERMKRIEEGIKELGSQILKEHPVENTQLQNEKLYLYYLQNGRDMYVDQELDINRLSDYDVDHIVPQSFLKDDSIDNKVLTRSDKNRGKSDNVPSEEVVKKMKNYWRQLLNAKLITQRKFDNLTKAERGGLSELDKAGFIKRQLVETRQITKHVAQILDSRMNTKYDENDKLIREVKVITLKSKLVSDFRKDFQFYKVREINNYHHAHDAYLNAVVGTALIKKYPKLESEFVYGDYKVYDVRKMIAKSEQEIGKATAKYFFYSNIMNFFKTEITLANGEIRKRPLIETNGETGEIVWDKGRDFATVRKVLSMPQVNIVKKTEVQTGGFSKESIRPKRNSDKLIARKKDWDPKKYGGFVSPTVAYSVLVVAKVEKGKSKKLKSVKELLGITIMERSSFEKNPIDFLEAKGYKEVKKDLIIKLPKYSLFELENGRKRMLASARFLQKGNELALPSKYVNFLYLASHYEKLKGSPEDNEQKQLFVEQHKHYLDEIIEQISEFSKRVILADANLDKVLSAYNKHRDKPIREQAENIIHLFTLTNLGAPRAFKYFDTTIDRKVYRSTKEVLDATLIHQSITGLYETRIDLSQLGGDSGGSGGSGGSTNLSDIIEKETGKQLVIQESILMLPEEVEEVIGNKPESDILVHTAYDESTDENVMLLTSDAPEYKPWALVIQDSNGENKIKMLSGGSGGSGGSTNLSDIIEKETGKQLVIQESILMLPEEVEEVIGNKPESDILVHTAYDESTDENVMLLTSDAPEYKPWALVIQDSNGENKIKMLSGGSKRTADGSEFEPKKKRKV

SEQ ID NO: 573 - protein, 1853 aa, synthetic construct
MKRTADGSEFESPKKKRKVSSETGPVAVDPTLRRRIEPHEFEVFFDPRELAAETCLLYEINWGGRHSIWRHTSQNTNKHVEVNFIEKFTTERYFCPNTRCSITWFLSWSPCGECSRAITEFLSRYPHVTLFIYIARLYHHADPRNRQGLRDLISSGVTIQIMTEQESGYCWRNFVNYSPSNEAHWPRYPHLWVRLYVLELYCIILGLPPCLNILRRKQPQLTFFTIALQSCHYQRLPPHILWATGLKSGGSSGGSSGSETPGTSESATPESSGGSSGGSDKKYSIGLAIGTNSVGWAVITDEYKVPSKKFKVLGNTDRHSIKKNLIGALLFDSGETAEATRLKRTARRRYTRRKNRICYLQEIFSNEMAKVDDSFFHRLEESFLVEEDKKHERHPIFGNIVDEVAYHEKYPTIYHLRKKLVDSTDKADLRLIYLALAHMIKFRGHFLIEGDLNPDNSDVDKLFIQLVQTYNQLFEENPINASGVDAKAILSARLSKSRRLENLIAQLPGEKKNGLFGNLIALSLGLTPNFKSNFDLAEDAKLQLSKDTYDDDLDNLLAQIGDQYADLFLAAKNLSDAILLSDILRVNTEITKAPLSASMIKRYDEHHQDLTLLKALVRQQLPEKYKEIFFDQSKNGYAGYIDGGASQEEFYKFIKPILEKMDGTEELLVKLNREDLLRKQRTFDNGSIPHQIHLGELHAILRRQEDFYPFLKDNREKIEKILTFRIPYYVGPLARGNSRFAWMTRKSEETITPWNFEEVVDKGASAQSFIERMTNFDKNLPNEKVLPKHSLLYEYFTVYNELTKVKYVTEGMRKPAFLSGEQKKAIVDLLFKTNRKVTVKQLKEDYFKKIECFDSVEISGVEDRFNASLGTYHDLLKIIKDKDFLDNEENEDILEDIVLTLTLFEDREMIEERLKTYAHLFDDKVMKQLKRRRYTGWGRLSRKLINGIRDKQSGKTILDFLKSDGFANRNFMQLIHDDSLTFKEDIQKAQVSGQGDSLHEHIANLAGSPAIKKGILQTVKVVDELVKVMGRHKPENIVIEMARENQTTQKGQKNSRERMKRIEEGIKELGSQILKEHPVENTQLQNEKLYLYYLQNGRDMYVDQELDINRLSDYDVDHIVPQSFLKDDSIDNKVLTRSDKNRGKSDNVPSEEVVKKMKNYWRQLLNAKLITQRKFDNLTKAERGGLSELDKAGFIKRQLVETRQITKHVAQILDSRMNTKYDENDKLIREVKVITLKSKLVSDFRKDFQFYKVREINNYHHAHDAYLNAVVGTALIKKYPKLESEFVYGDYKVYDVRKMIAKSEQEIGKATAKYFFYSNIMNFFKTEITLANGEIRKRPLIETNGETGEIVWDKGRDFATVRKVLSMPQVNIVKKTEVQTGGFSKESIRPKRNSDKLIARKKDWDPKKYGGFVSPTVAYSVLVVAKVEKGKSKKLKSVKELLGITIMERSSFEKNPIDFLEAKGYKEVKKDLIIKLPKYSLFELENGRKRMLASARFLQKGNELALPSKYVNFLYLASHYEKLKGSPEDNEQKQLFVEQHKHYLDEIIEQISEFSKRVILADANLDKVLSAYNKHRDKPIREQAENIIHLFTLTNLGAPRAFKYFDTTIDRKVYRSTKEVLDATLIHQSITGLYETRIDLSQLGGDSGGSGGSGGSTNLSDIIEKETGKQLVIQESILMLPEEVEEVIGNKPESDILVHTAYDESTDENVMLLTSDAPEYKPWALVIQDSNGENKIKMLSGGSGGSGGSTNLSDIIEKETGKQLVIQESILMLPEEVEEVIGNKPESDILVHTAYDESTDENVMLLTSDAPEYKPWALVIQDSNGENKIKMLSGGSKRTADGSEFEPKKKRKV

SEQ ID NO: 574 - protein, 1874 aa, synthetic construct
MKRTADGSEFESPKKKRKVSSETGPVAVDPTLRRRIEPHEFEVFFDPRELRKETCLLYEINWGGRHSIWRHTSQNTNKHVEVNFIEKFTTERYFCPNTRCSITWFLSYSPCGECSRAITEFLSRYPHVTLFIYIARLYHHADPENRQGLRDLISSGVTIQIMTEQESGYCWRNFVNYSPSNEAHWPRYPHLWVRLYVLELYCIILGLPPCLNILRRKQPQLTFFTIALQSCHYQRLPPHILWATGLKSGGSSGGSSGSETPGTSESATPESSGGSSGGSEIGKATAKYFFYSNIMNFFKTEITLANGEIRKRPLIETNGETGEIVWDKGRDFATVRKVLSMPQVNIVKKTEVQTGGFSKESILPKRNSDKLIARKKDWDPKKYGGFDSPTVAYSVLVVAKVEKGKSKKLKSVKELLGITIMERSSFEKNPIDFLEAKGYKEVKKDLIIKLPKYSLFELENGRKRMLASAGELQKGNELALPSKYVNFLYLASHYEKLKGSPEDNEQKQLFVEQHKHYLDEIIEQISEFSKRVILADANLDKVLSAYNKHRDKPIREQAENIIHLFTLTNLGAPAAFKYFDTTIDRKRYTSTKEVLDATLIHQSITGLYETRIDLSQLGGDGGSGGSGGSGGSGGSGGSGGMDKKYSIGLAIGTNSVGWAVITDEYKVPSKKFKVLGNTDRHSIKKNLIGALLFDSGETAEATRLKRTARRRYTRRKNRICYLQEIFSNEMAKVDDSFFHRLEESFLVEEDKKHERHPIFGNIVDEVAYHEKYPTIYHLRKKLVDSTDKADLRLIYLALAHMIKFRGHFLIEGDLNPDNSDVDKLFIQLVQTYNQLFEENPINASGVDAKAILSARLSKSRRLENLIAQLPGEKKNGLFGNLIALSLGLTPNFKSNFDLAEDAKLQLSKDTYDDDLDNLLAQIGDQYADLFLAAKNLSDAILLSDILRVNTEITKAPLSASMIKRYDEHHQDLTLLKALVRQQLPEKYKEIFFDQSKNGYAGYIDGGASQEEFYKFIKPILEKMDGTEELLVKLNREDLLRKQRTFDNGSIPHQIHLGELHAILRRQEDFYPFLKDNREKIEKILTFRIPYYVGPLARGNSRFAWMTRKSEETITPWNFEEVVDKGASAQSFIERMTNFDKNLPNEKVLPKHSLLYEYFTVYNELTKVKYVTEGMRKPAFLSGEQKKAIVDLLFKTNRKVTVKQLKEDYFKKIECFDSVEISGVEDRFNASLGTYHDLLKIIKDKDFLDNEENEDILEDIVLTLTLFEDREMIEERLKTYAHLFDDKVMKQLKRRRYTGWGRLSRKLINGIRDKQSGKTILDFLKSDGFANRNFMQLIHDDSLTFKEDIQKAQVSGQGDSLHEHIANLAGSPAIKKGILQTVKVVDELVKVMGRHKPENIVIEMARENQTTQKGQKNSRERMKRIEEGIKELGSQILKEHPVENTQLQNEKLYLYYLQNGRDMYVDQELDINRLSDYDVDHIVPQSFLKDDSIDNKVLTRSDKNRGKSDNVPSEEVVKKMKNYWRQLLNAKLITQRKFDNLTKAERGGLSELDKAGFIKRQLVETRQITKHVAQILDSRMNTKYDENDKLIREVKVITLKSKLVSDFRKDFQFYKVREINNYHHAHDAYLNAVVGTALIKKYPKLESEFVYGDYKVYDVRKMIAKSEQSGGSGGSGGSTNLSDIIEKETGKQLVIQESILMLPEEVEEVIGNKPESDILVHTAYDESTDENVMLLTSDAPEYKPWALVIQDSNGENKIKMLSGGSGGSGGSTNLSDIIEKETGKQLVIQESILMLPEEVEEVIGNKPESDILVHTAYDESTDENVMLLTSDAPEYKPWALVIQDSNGENKIKMLSGGSKRTADGSEFEPKKKRKV

SEQ ID NO: 575 - protein, 1874 aa, synthetic construct
MKRTADGSEFESPKKKRKVSSETGPVAVDPTLRRRIEPHEFEVFFDPRELRKETCLLYEINWGGRHSIWRHTSQNTNKHVEVNFIEKFTTERYFCPNTRCSITWFLSYSPCGECSRAITEFLSRYPHVTLFIYIARLYHHADPRNRQGLEDLISSGVTIQIMTEQESGYCWRNFVNYSPSNEAHWPRYPHLWVRLYVLELYCIILGLPPCLNILRRKQPQLTFFTIALQSCHYQRLPPHILWATGLKSGGSSGGSSGSETPGTSESATPESSGGSSGGSEIGKATAKYFFYSNIMNFFKTEITLANGEIRKRPLIETNGETGEIVWDKGRDFATVRKVLSMPQVNIVKKTEVQTGGFSKESILPKRNSDKLIARKKDWDPKKYGGFDSPTVAYSVLVVAKVEKGKSKKLKSVKELLGITIMERSSFEKNPIDFLEAKGYKEVKKDLIIKLPKYSLFELENGRKRMLASAGELQKGNELALPSKYVNFLYLASHYEKLKGSPEDNEQKQLFVEQHKHYLDEIIEQISEFSKRVILADANLDKVLSAYNKHRDKPIREQAENIIHLFTLTNLGAPAAFKYFDTTIDRKRYTSTKEVLDATLIHQSITGLYETRIDLSQLGGDGGSGGSGGSGGSGGSGGSGGMDKKYSIGLAIGTNSVGWAVITDEYKVPSKKFKVLGNTDRHSIKKNLIGALLFDSGETAEATRLKRTARRRYTRRKNRICYLQEIFSNEMAKVDDSFFHRLEESFLVEEDKKHERHPIFGNIVDEVAYHEKYPTIYHLRKKLVDSTDKADLRLIYLALAHMIKFRGHFLIEGDLNPDNSDVDKLFIQLVQTYNQLFEENPINASGVDAKAILSARLSKSRRLENLIAQLPGEKKNGLFGNLIALSLGLTPNFKSNFDLAEDAKLQLSKDTYDDDLDNLLAQIGDQYADLFLAAKNLSDAILLSDILRVNTEITKAPLSASMIKRYDEHHQDLTLLKALVRQQLPEKYKEIFFDQSKNGYAGYIDGGASQEEFYKFIKPILEKMDGTEELLVKLNREDLLRKQRTFDNGSIPHQIHLGELHAILRRQEDFYPFLKDNREKIEKILTFRIPYYVGPLARGNSRFAWMTRKSEETITPWNFEEVVDKGASAQSFIERMTNFDKNLPNEKVLPKHSLLYEYFTVYNELTKVKYVTEGMRKPAFLSGEQKKAIVDLLFKTNRKVTVKQLKEDYFKKIECFDSVEISGVEDRFNASLGTYHDLLKIIKDKDFLDNEENEDILEDIVLTLTLFEDREMIEERLKTYAHLFDDKVMKQLKRRRYTGWGRLSRKLINGIRDKQSGKTILDFLKSDGFANRNFMQLIHDDSLTFKEDIQKAQVSGQGDSLHEHIANLAGSPAIKKGILQTVKVVDELVKVMGRHKPENIVIEMARENQTTQKGQKNSRERMKRIEEGIKELGSQILKEHPVENTQLQNEKLYLYYLQNGRDMYVDQELDINRLSDYDVDHIVPQSFLKDDSIDNKVLTRSDKNRGKSDNVPSEEVVKKMKNYWRQLLNAKLITQRKFDNLTKAERGGLSELDKAGFIKRQLVETRQITKHVAQILDSRMNTKYDENDKLIREVKVITLKSKLVSDFRKDFQFYKVREINNYHHAHDAYLNAVVGTALIKKYPKLESEFVYGDYKVYDVRKMIAKSEQSGGSGGSGGSTNLSDIIEKETGKQLVIQESILMLPEEVEEVIGNKPESDILVHTAYDESTDENVMLLTSDAPEYKPWALVIQDSNGENKIKMLSGGSGGSGGSTNLSDIIEKETGKQLVIQESILMLPEEVEEVIGNKPESDILVHTAYDESTDENVMLLTSDAPEYKPWALVIQDSNGENKIKMLSGGSKRTADGSEFEPKKKRKV

SEQ ID NO: 576 - protein, 1874 aa, synthetic construct
MKRTADGSEFESPKKKRKVSSETGPVAVDPTLRRRIEPHEFEVFFDPRELRKETCLLYEINWGGRHSIWRHTSQNTNKHVEVNFIEKFTTERYFCPNTRCSITWFLSYSPCGECSRAITEFLSRYPHVTLFIYIARLYHHADPENRQGLEDLISSGVTIQIMTEQESGYCWRNFVNYSPSNEAHWPRYPHLWVRLYVLELYCIILGLPPCLNILRRKQPQLTFFTIALQSCHYQRLPPHILWATGLKSGGSSGGSSGSETPGTSESATPESSGGSSGGSEIGKATAKYFFYSNIMNFFKTEITLANGEIRKRPLIETNGETGEIVWDKGRDFATVRKVLSMPQVNIVKKTEVQTGGFSKESILPKRNSDKLIARKKDWDPKKYGGFDSPTVAYSVLVVAKVEKGKSKKLKSVKELLGITIMERSSFEKNPIDFLEAKGYKEVKKDLIIKLPKYSLFELENGRKRMLASAGELQKGNELALPSKYVNFLYLASHYEKLKGSPEDNEQKQLFVEQHKHYLDEIIEQISEFSKRVILADANLDKVLSAYNKHRDKPIREQAENIIHLFTLTNLGAPAAFKYFDTTIDRKRYTSTKEVLDATLIHQSITGLYETRIDLSQLGGDGGSGGSGGSGGSGGSGGSGGMDKKYSIGLAIGTNSVGWAVITDEYKVPSKKFKVLGNTDRHSIKKNLIGALLFDSGETAEATRLKRTARRRYTRRKNRICYLQEIFSNEMAKVDDSFFHRLEESFLVEEDKKHERHPIFGNIVDEVAYHEKYPTIYHLRKKLVDSTDKADLRLIYLALAHMIKFRGHFLIEGDLNPDNSDVDKLFIQLVQTYNQLFEENPINASGVDAKAILSARLSKSRRLENLIAQLPGEKKNGLFGNLIALSLGLTPNFKSNFDLAEDAKLQLSKDTYDDDLDNLLAQIGDQYADLFLAAKNLSDAILLSDILRVNTEITKAPLSASMIKRYDEHHQDLTLLKALVRQQLPEKYKEIFFDQSKNGYAGYIDGGASQEEFYKFIKPILEKMDGTEELLVKLNREDLLRKQRTFDNGSIPHQIHLGELHAILRRQEDFYPFLKDNREKIEKILTFRIPYYVGPLARGNSRFAWMTRKSEETITPWNFEEVVDKGASAQSFIERMTNFDKNLPNEKVLPKHSLLYEYFTVYNELTKVKYVTEGMRKPAFLSGEQKKAIVDLLFKTNRKVTVKQLKEDYFKKIECFDSVEISGVEDRFNASLGTYHDLLKIIKDKDFLDNEENEDILEDIVLTLTLFEDREMIEERLKTYAHLFDDKVMKQLKRRRYTGWGRLSRKLINGIRDKQSGKTILDFLKSDGFANRNFMQLIHDDSLTFKEDIQKAQVSGQGDSLHEHIANLAGSPAIKKGILQTVKVVDELVKVMGRHKPENIVIEMARENQTTQKGQKNSRERMKRIEEGIKELGSQILKEHPVENTQLQNEKLYLYYLQNGRDMYVDQELDINRLSDYDVDHIVPQSFLKDDSIDNKVLTRSDKNRGKSDNVPSEEVVKKMKNYWRQLLNAKLITQRKFDNLTKAERGGLSELDKAGFIKRQLVETRQITKHVAQILDSRMNTKYDENDKLIREVKVITLKSKLVSDFRKDFQFYKVREINNYHHAHDAYLNAVVGTALIKKYPKLESEFVYGDYKVYDVRKMIAKSEQSGGSGGSGGSTNLSDIIEKETGKQLVIQESILMLPEEVEEVIGNKPESDILVHTAYDESTDENVMLLTSDAPEYKPWALVIQDSNGENKIKMLSGGSGGSGGSTNLSDIIEKETGKQLVIQESILMLPEEVEEVIGNKPESDILVHTAYDESTDENVMLLTSDAPEYKPWALVIQDSNGENKIKMLSGGSKRTADGSEFEPKKKRKV

SEQ ID NO: 577 - protein, 1874 aa, synthetic construct
MKRTADGSEFESPKKKRKVSSETGPVAVDPTLRRRIEPHEFEVFFDPRELRKETCLLYEINWGGRHSIWRHTSQNTNKHVEVNFIEKFTTERYFCPNTRCSITWFLSWSPCGECSRAITEFLSRYPHVTLFIYIARLYHHADPENRQGLEDLISSGVTIQIMTEQESGYCWRNFVNYSPSNEAHWPRYPHLWVRLYVLELYCIILGLPPCLNILRRKQPQLTFFTIALQSCHYQRLPPHILWATGLKSGGSSGGSSGSETPGTSESATPESSGGSSGGSEIGKATAKYFFYSNIMNFFKTEITLANGEIRKRPLIETNGETGEIVWDKGRDFATVRKVLSMPQVNIVKKTEVQTGGFSKESILPKRNSDKLIARKKDWDPKKYGGFDSPTVAYSVLVVAKVEKGKSKKLKSVKELLGITIMERSSFEKNPIDFLEAKGYKEVKKDLIIKLPKYSLFELENGRKRMLASAGELQKGNELALPSKYVNFLYLASHYEKLKGSPEDNEQKQLFVEQHKHYLDEIIEQISEFSKRVILADANLDKVLSAYNKHRDKPIREQAENIIHLFTLTNLGAPAAFKYFDTTIDRKRYTSTKEVLDATLIHQSITGLYETRIDLSQLGGDGGSGGSGGSGGSGGSGGSGGMDKKYSIGLAIGTNSVGWAVITDEYKVPSKKFKVLGNTDRHSIKKNLIGALLFDSGETAEATRLKRTARRRYTRRKNRICYLQEIFSNEMAKVDDSFFHRLEESFLVEEDKKHERHPIFGNIVDEVAYHEKYPTIYHLRKKLVDSTDKADLRLIYLALAHMIKFRGHFLIEGDLNPDNSDVDKLFIQLVQTYNQLFEENPINASGVDAKAILSARLSKSRRLENLIAQLPGEKKNGLFGNLIALSLGLTPNFKSNFDLAEDAKLQLSKDTYDDDLDNLLAQIGDQYADLFLAAKNLSDAILLSDILRVNTEITKAPLSASMIKRYDEHHQDLTLLKALVRQQLPEKYKEIFFDQSKNGYAGYIDGGASQEEFYKFIKPILEKMDGTEELLVKLNREDLLRKQRTFDNGSIPHQIHLGELHAILRRQEDFYPFLKDNREKIEKILTFRIPYYVGPLARGNSRFAWMTRKSEETITPWNFEEVVDKGASAQSFIERMTNFDKNLPNEKVLPKHSLLYEYFTVYNELTKVKYVTEGMRKPAFLSGEQKKAIVDLLFKTNRKVTVKQLKEDYFKKIECFDSVEISGVEDRFNASLGTYHDLLKIIKDKDFLDNEENEDILEDIVLTLTLFEDREMIEERLKTYAHLFDDKVMKQLKRRRYTGWGRLSRKLINGIRDKQSGKTILDFLKSDGFANRNFMQLIHDDSLTFKEDIQKAQVSGQGDSLHEHIANLAGSPAIKKGILQTVKVVDELVKVMGRHKPENIVIEMARENQTTQKGQKNSRERMKRIEEGIKELGSQILKEHPVENTQLQNEKLYLYYLQNGRDMYVDQELDINRLSDYDVDHIVPQSFLKDDSIDNKVLTRSDKNRGKSDNVPSEEVVKKMKNYWRQLLNAKLITQRKFDNLTKAERGGLSELDKAGFIKRQLVETRQITKHVAQILDSRMNTKYDENDKLIREVKVITLKSKLVSDFRKDFQFYKVREINNYHHAHDAYLNAVVGTALIKKYPKLESEFVYGDYKVYDVRKMIAKSEQSGGSGGSGGSTNLSDIIEKETGKQLVIQESILMLPEEVEEVIGNKPESDILVHTAYDESTDENVMLLTSDAPEYKPWALVIQDSNGENKIKMLSGGSGGSGGSTNLSDIIEKETGKQLVIQESILMLPEEVEEVIGNKPESDILVHTAYDESTDENVMLLTSDAPEYKPWALVIQDSNGENKIKMLSGGSKRTADGSEFEPKKKRKV

SEQ ID NO: 578 - protein, 1874 aa, synthetic construct
MKRTADGSEFESPKKKRKVSSETGPVAVDPTLRRRIEPHEFEVFFDPRELAAETCLLYEINWGGRHSIWRHTSQNTNKHVEVNFIEKFTTERYFCPNTRCSITWFLSWSPCGECSRAITEFLSRYPHVTLFIYIARLYHHADPRNRQGLRDLISSGVTIQIMTEQESGYCWRNFVNYSPSNEAHWPRYPHLWVRLYVLELYCIILGLPPCLNILRRKQPQLTFFTIALQSCHYQRLPPHILWATGLKSGGSSGGSSGSETPGTSESATPESSGGSSGGSEIGKATAKYFFYSNIMNFFKTEITLANGEIRKRPLIETNGETGEIVWDKGRDFATVRKVLSMPQVNIVKKTEVQTGGFSKESILPKRNSDKLIARKKDWDPKKYGGFDSPTVAYSVLVVAKVEKGKSKKLKSVKELLGITIMERSSFEKNPIDFLEAKGYKEVKKDLIIKLPKYSLFELENGRKRMLASAGELQKGNELALPSKYVNFLYLASHYEKLKGSPEDNEQKQLFVEQHKHYLDEIIEQISEFSKRVILADANLDKVLSAYNKHRDKPIREQAENIIHLFTLTNLGAPAAFKYFDTTIDRKRYTSTKEVLDATLIHQSITGLYETRIDLSQLGGDGGSGGSGGSGGSGGSGGSGGMDKKYSIGLAIGTNSVGWAVITDEYKVPSKKFKVLGNTDRHSIKKNLIGALLFDSGETAEATRLKRTARRRYTRRKNRICYLQEIFSNEMAKVDDSFFHRLEESFLVEEDKKHERHPIFGNIVDEVAYHEKYPTIYHLRKKLVDSTDKADLRLIYLALAHMIKFRGHFLIEGDLNPDNSDVDKLFIQLVQTYNQLFEENPINASGVDAKAILSARLSKSRRLENLIAQLPGEKKNGLFGNLIALSLGLTPNFKSNFDLAEDAKLQLSKDTYDDDLDNLLAQIGDQYADLFLAAKNLSDAILLSDILRVNTEITKAPLSASMIKRYDEHHQDLTLLKALVRQQLPEKYKEIFFDQSKNGYAGYIDGGASQEEFYKFIKPILEKMDGTEELLVKLNREDLLRKQRTFDNGSIPHQIHLGELHAILRRQEDFYPFLKDNREKIEKILTFRIPYYVGPLARGNSRFAWMTRKSEETITPWNFEEVVDKGASAQSFIERMTNFDKNLPNEKVLPKHSLLYEYFTVYNELTKVKYVTEGMRKPAFLSGEQKKAIVDLLFKTNRKVTVKQLKEDYFKKIECFDSVEISGVEDRFNASLGTYHDLLKIIKDKDFLDNEENEDILEDIVLTLTLFEDREMIEERLKTYAHLFDDKVMKQLKRRRYTGWGRLSRKLINGIRDKQSGKTILDFLKSDGFANRNFMQLIHDDSLTFKEDIQKAQVSGQGDSLHEHIANLAGSPAIKKGILQTVKVVDELVKVMGRHKPENIVIEMARENQTTQKGQKNSRERMKRIEEGIKELGSQILKEHPVENTQLQNEKLYLYYLQNGRDMYVDQELDINRLSDYDVDHIVPQSFLKDDSIDNKVLTRSDKNRGKSDNVPSEEVVKKMKNYWRQLLNAKLITQRKFDNLTKAERGGLSELDKAGFIKRQLVETRQITKHVAQILDSRMNTKYDENDKLIREVKVITLKSKLVSDFRKDFQFYKVREINNYHHAHDAYLNAVVGTALIKKYPKLESEFVYGDYKVYDVRKMIAKSEQSGGSGGSGGSTNLSDIIEKETGKQLVIQESILMLPEEVEEVIGNKPESDILVHTAYDESTDENVMLLTSDAPEYKPWALVIQDSNGENKIKMLSGGSGGSGGSTNLSDIIEKETGKQLVIQESILMLPEEVEEVIGNKPESDILVHTAYDESTDENVMLLTSDAPEYKPWALVIQDSNGENKIKMLSGGSKRTADGSEFEPKKKRKV

SEQ ID NO: 579 - protein, 229 aa, Rattus sp. [sequence omitted]

SEQ ID NO: 580 - protein, 236 aa, Homo sapiens; identical to SEQ ID NO: 48

SEQ ID NO: 581 - protein, 200 aa, Homo sapiens
MSEASPASGPRHLMDPHIFTSNFNNGIGRHKTYLCYEVERLDNGTSVKMDQHRGFLHNQAKNLLCGFYGRHAELRFLDLVPSLQLDPAQIYRVTWFISWSPCFSWGCAGEVRAFLQENTHVRLRIFAARIYDYDPLYKEALQMLRDAGAQVSIMTYDEFKHCWDTFVDHQGCPFQPWDGLDEHSQALSGRLRAILQNQGN

SEQ ID NO: 582 - protein, 382 aa, Homo sapiens; identical to SEQ ID NO: 37

SEQ ID NO: 583 - protein, 384 aa, Homo sapiens; identical to SEQ ID NO: 36

SEQ ID NO: 584 - protein, 199 aa, synthetic construct
MEASPASGPRHLMDPHIFTSNFNNGIGRHKTYLCYEVERLDNGTSVKMDQHRGFLHGQAKNLLCGFYGRHAELRFLDLVPSLQLDPAQIYRVTWFISWSPCFSWGCAGEVRAFLQENTHVRLRIFAARIYDYDPLYKEALQMLRDAGAQVSIMTYDEFKHCWDTFVDHQGCPFQPWDGLDEHSQALSGRLRAILQNQGN

SEQ ID NO: 585 - protein, 208 aa, synthetic construct
MTDAEYVRIHEKLDIYTFKKQFSNNKKSVSHRCYVLFELKRRGERRACFWGYAVNKPQSGTERGIHAEIFSIRKVEEYLRDNPGQFTINWYSSWSPCADCAEKILEWYNQELRGNGHTLKIWVCKLYYEKNARNQIGLWNLRDNGVGLNVMVSEHYQCCRKIFIQSSHNQLNENRWLEKTLKRAEKRRSELSIMFQVKILHTTKSPAV

SEQ ID NO: 586 - protein, 229 aa, synthetic construct
MSSKTGPVAVDPTLRRRIEPHEFEVFFDPRELRKETCLLYEINWGGRHSIWRHTSQNTNKHVEVNFIEKFTTERYFCPNTRCSITWFLSWSPCGECSRAITEFLSRYPNVTLFIYIARLYHLANPRNRQGLRDLISSGVTIQIMTEQESGYCWHNFVNYSPSNESHWPRYPHLWVRLYVLELYCIILGLPPCLNILRRKQSQLTSFTIALQSCHYQRLPPHILWATGLK

SEQ ID NO: 587 - protein, 229 aa, synthetic construct
MSSETGPVAVDPTLRRRIEPHEFEVFFDPRELRKETCLLYEINWGGRHSIWRHTSQNTNKHVEVNFIEKFTTERYFCPNTRCSITWFLSYSPCGECSRAITEFLSRYPHVTLFIYIARLYHHADPENRQGLRDLISSGVTIQIMTEQESGYCWRNFVNYSPSNEAHWPRYPHLWVRLYVLELYCIILGLPPCLNILRRKQPQLTFFTIALQSCHYQRLPPHILWATGLK

SEQ ID NO: 588 - protein, 229 aa, synthetic construct
MSSETGPVAVDPTLRRRIEPHEFEVFFDPRELRKETCLLYEINWGGRHSIWRHTSQNTNKHVEVNFIEKFTTERYFCPNTRCSITWFLSYSPCGECSRAITEFLSRYPHVTLFIYIARLYHHADPRNRQGLEDLISSGVTIQIMTEQESGYCWRNFVNYSPSNEAHWPRYPHLWVRLYVLELYCIILGLPPCLNILRRKQPQLTFFTIALQSCHYQRLPPHILWATGLK

SEQ ID NO: 589 - protein, 229 aa, synthetic construct
MSSETGPVAVDPTLRRRIEPHEFEVFFDPRELRKETCLLYEINWGGRHSIWRHTSQNTNKHVEVNFIEKFTTERYFCPNTRCSITWFLSYSPCGECSRAITEFLSRYPHVTLFIYIARLYHHADPENRQGLEDLISSGVTIQIMTEQESGYCWRNFVNYSPSNEAHWPRYPHLWVRLYVLELYCIILGLPPCLNILRRKQPQLTFFTIALQSCHYQRLPPHILWATGLK

SEQ ID NO: 590 - protein, 229 aa, synthetic construct
MSSETGPVAVDPTLRRRIEPHEFEVFFDPRELRKETCLLYEINWGGRHSIWRHTSQNTNKHVEVNFIEKFTTERYFCPNTRCSITWFLSWSPCGECSRAITEFLSRYPHVTLFIYIARLYHHADPENRQGLEDLISSGVTIQIMTEQESGYCWRNFVNYSPSNEAHWPRYPHLWVRLYVLELYCIILGLPPCLNILRRKQPQLTFFTIALQSCHYQRLPPHILWATGLK

SEQ ID NO: 591 - protein, 229 aa, synthetic construct
MSSETGPVAVDPTLRRRIEPHEFEVFFDPRELAKETCLLYEINWGGRHSIWRHTSQNTNKHVEVNFIEKFTTERYFCPNTRCSITWFLSWSPCGECSRAITEFLSRYPHVTLFIYIARLYHHADPRNRQGLRDLISSGVTIQIMTEQESGYCWRNFVNYSPSNEAHWPRYPHLWVRLYVLELYCIILGLPPCLNILRRKQPQLTFFTIALQSCHYQRLPPHILWATGLK

SEQ ID NO: 592 - protein, 229 aa, synthetic construct
MSSETGPVAVDPTLRRRIEPHEFEVFFDPRELAAETCLLYEINWGGRHSIWRHTSQNTNKHVEVNFIEKFTTERYFCPNTRCSITWFLSWSPCGECSRAITEFLSRYPHVTLFIYIARLYHHADPRNRQGLRDLISSGVTIQIMTEQESGYCWRNFVNYSPSNEAHWPRYPHLWVRLYVLELYCIILGLPPCLNILRRKQPQLTFFTIALQSCHYQRLPPHILWATGLK

SEQ ID NO: 593 - protein, 229 aa, synthetic construct
MSSETGPVAVDPTLRRRIEPHEFEVFFDPRELAAETCLLYEINWGGRHSIWRHTSQNTNKHVEVNFIEKFTTERYFCPNTRCSITWFLSWSPCGECSRAITEFLSRYPHVTLFIYIARLYHLANPRNRQGLRDLISSGVTIQIMTEQESGYCWRNFVNYSPSNEAHWPRYPHLWVRLYVLELYCIILGLPPCLNILRRKQPQLTFFTIALQSCHYQRLPPHILWATGLK

SEQ ID NO: 594 - protein, 162 aa, synthetic construct
MFERNYDPRELRKETYLLYEIKWGKSGKLWRHWCQNNRTQHAEVYFLENIFNARRFNPSTHCSITWYLSWSPCAECSQKIVDFLKEHPNVNLEIYVARLYYHEDERNRQGLRDLVNSGVTIRIMDLPDYNYCWKTFVSDQGGDEDYWPGHFAPWIKQYSLKL

SEQ ID NO: 595 - protein, 162 aa, synthetic construct
MFERNYDPRELRKETYLLYEIKWGKSGKLWRHWCQNNRTQHAEVYFLENIFNARRFNPSTHCSITWYLSWSPCAECSQKIVDFLKEHPNVNLEIYVARLYYPENERNRQGLRDLVNSGVTIRIMDLPDYNYCWKTFVSDQGGDEDYWPGHFAPWIKQYSLKL

SEQ ID NO: 596 - skipped

SEQ ID NO: 597 - protein, 1853 aa, synthetic construct; identical to SEQ ID NO: 553

SEQ ID NO: 598 - protein, 1824 aa, synthetic construct
MSSETGPVAVDPTLRRRIEPHEFEVFFDPRELRKETCLLYEINWGGRHSIWRHTSQNTNKHVEVNFIEKFTTERYFCPNTRCSITWFLSWSPCGECSRAITEFLSRYPHVTLFIYIARLYHHADPRNRQGLRDLISSGVTIQIMTEQESGYCWRNFVNYSPSNEAHWPRYPHLWVRLYVLELYCIILGLPPCLNILRRKQPQLTFFTIALQSCHYQRLPPHILWATGLKSGGSSGGSSGSETPGTSESATPESSGGSSGGSDKKYSIGLAIGTNSVGWAVITDEYKVPSKKFKVLGNTDRHSIKKNLIGALLFDSGETAEATRLKRTARRRYTRRKNRICYLQEIFSNEMAKVDDSFFHRLEESFLVEEDKKHERHPIFGNIVDEVAYHEKYPTIYHLRKKLVDSTDKADLRLIYLALAHMIKFRGHFLIEGDLNPDNSDVDKLFIQLVQTYNQLFEENPINASGVDAKAILSARLSKSRRLENLIAQLPGEKKNGLFGNLIALSLGLTPNFKSNFDLAEDAKLQLSKDTYDDDLDNLLAQIGDQYADLFLAAKNLSDAILLSDILRVNTEITKAPLSASMIKRYDEHHQDLTLLKALVRQQLPEKYKEIFFDQSKNGYAGYIDGGASQEEFYKFIKPILEKMDGTEELLVKLNREDLLRKQRTFDNGSIPHQIHLGELHAILRRQEDFYPFLKDNREKIEKILTFRIPYYVGPLARGNSRFAWMTRKSEETITPWNFEEVVDKGASAQSFIERMTNFDKNLPNEKVLPKHSLLYEYFTVYNELTKVKYVTEGMRKPAFLSGEQKKAIVDLLFKTNRKVTVKQLKEDYFKKIECFDSVEISGVEDRFNASLGTYHDLLKIIKDKDFLDNEENEDILEDIVLTLTLFEDREMIEERLKTYAHLFDDKVMKQLKRRRYTGWGRLSRKLINGIRDKQSGKTILDFLKSDGFANRNFMQLIHDDSLTFKEDIQKAQVSGQGDSLHEHIANLAGSPAIKKGILQTVKVVDELVKVMGRHKPENIVIEMARENQTTQKGQKNSRERMKRIEEGIKELGSQILKEHPVENTQLQNEKLYLYYLQNGRDMYVDQELDINRLSDYDVDHIVPQSFLKDDSIDNKVLTRSDKNRGKSDNVPSEEVVKKMKNYWRQLLNAKLITQRKFDNLTKAERGGLSELDKAGFIKRQLVETRQITKHVAQILDSRMNTKYDENDKLIREVKVITLKSKLVSDFRKDFQFYKVREINNYHHAHDAYLNAVVGTALIKKYPKLESEFVYGDYKVYDVRKMIAKSEQEIGKATAKYFFYSNIMNFFKTEITLANGEIRKRPLIETNGETGEIVWDKGRDFATVRKVLSMPQVNIVKKTEVQTGGFSKESILPKRNSDKLIARKKDWDPKKYGGFDSPTVAYSVLVVAKVEKGKSKKLKSVKELLGITIMERSSFEKNPIDFLEAKGYKEVKKDLIIKLPKYSLFELENGRKRMLASAGELQKGNELALPSKYVNFLYLASHYEKLKGSPEDNEQKQLFVEQHKHYLDEIIEQISEFSKRVILADANLDKVLSAYNKHRDKPIREQAENIIHLFTLTNLGAPAAFKYFDTTIDRKRYTSTKEVLDATLIHQSITGLYETRIDLSQLGGDSGGSGGSGGSTNLSDIIEKETGKQLVIQESILMLPEEVEEVIGNKPESDILVHTAYDESTDENVMLLTSDAPEYKPWALVIQDSNGENKIKMLSGGSGGSGGSTNLSDIIEKETGKQLVIQESILMLPEEVEEVIGNKPESDILVHTAYDESTDENVMLLTSDAPEYKPWALVIQDSNGENKIKMLSGGSPKKKRK

SEQ ID NO: 599 - protein, 1838 aa, synthetic construct
MHHHHHHHHGSGGSGSSETGPVAVDPTLRRRIEPHEFEVFFDPRELRKETCLLYEINWGGRHSIWRHTSQNTNKHVEVNFIEKFTTERYFCPNTRCSITWFLSWSPCGECSRAITEFLSRYPHVTLFIYIARLYHHADPRNRQGLRDLISSGVTIQIMTEQESGYCWRNFVNYSPSNEAHWPRYPHLWVRLYVLELYCIILGLPPCLNILRRKQPQLTFFTIALQSCHYQRLPPHILWATGLKSGGSSGGSSGSETPGTSESATPESSGGSSGGSDKKYSIGLAIGTNSVGWAVITDEYKVPSKKFKVLGNTDRHSIKKNLIGALLFDSGETAEATRLKRTARRRYTRRKNRICYLQEIFSNEMAKVDDSFFHRLEESFLVEEDKKHERHPIFGNIVDEVAYHEKYPTIYHLRKKLVDSTDKADLRLIYLALAHMIKFRGHFLIEGDLNPDNSDVDKLFIQLVQTYNQLFEENPINASGVDAKAILSARLSKSRRLENLIAQLPGEKKNGLFGNLIALSLGLTPNFKSNFDLAEDAKLQLSKDTYDDDLDNLLAQIGDQYADLFLAAKNLSDAILLSDILRVNTEITKAPLSASMIKRYDEHHQDLTLLKALVRQQLPEKYKEIFFDQSKNGYAGYIDGGASQEEFYKFIKPILEKMDGTEELLVKLNREDLLRKQRTFDNGSIPHQIHLGELHAILRRQEDFYPFLKDNREKIEKILTFRIPYYVGPLARGNSRFAWMTRKSEETITPWNFEEVVDKGASAQSFIERMTNFDKNLPNEKVLPKHSLLYEYFTVYNELTKVKYVTEGMRKPAFLSGEQKKAIVDLLFKTNRKVTVKQLKEDYFKKIECFDSVEISGVEDRFNASLGTYHDLLKIIKDKDFLDNEENEDILEDIVLTLTLFEDREMIEERLKTYAHLFDDKVMKQLKRRRYTGWGRLSRKLINGIRDKQSGKTILDFLKSDGFANRNFMQLIHDDSLTFKEDIQKAQVSGQGDSLHEHIANLAGSPAIKKGILQTVKVVDELVKVMGRHKPENIVIEMARENQTTQKGQKNSRERMKRIEEGIKELGSQILKEHPVENTQLQNEKLYLYYLQNGRDMYVDQELDINRLSDYDVDHIVPQSFLKDDSIDNKVLTRSDKNRGKSDNVPSEEVVKKMKNYWRQLLNAKLITQRKFDNLTKAERGGLSELDKAGFIKRQLVETRQITKHVAQILDSRMNTKYDENDKLIREVKVITLKSKLVSDFRKDFQFYKVREINNYHHAHDAYLNAVVGTALIKKYPKLESEFVYGDYKVYDVRKMIAKSEQEIGKATAKYFFYSNIMNFFKTEITLANGEIRKRPLIETNGETGEIVWDKGRDFATVRKVLSMPQVNIVKKTEVQTGGFSKESILPKRNSDKLIARKKDWDPKKYGGFDSPTVAYSVLVVAKVEKGKSKKLKSVKELLGITIMERSSFEKNPIDFLEAKGYKEVKKDLIIKLPKYSLFELENGRKRMLASAGELQKGNELALPSKYVNFLYLASHYEKLKGSPEDNEQKQLFVEQHKHYLDEIIEQISEFSKRVILADANLDKVLSAYNKHRDKPIREQAENIIHLFTLTNLGAPAAFKYFDTTIDRKRYTSTKEVLDATLIHQSITGLYETRIDLSQLGGDSGGSGGSGGSTNLSDIIEKETGKQLVIQESILMLPEEVEEVIGNKPESDILVHTAYDESTDENVMLLTSDAPEYKPWALVIQDSNGENKIKMLSGGSGGSGGSTNLSDIIEKETGKQLVIQESILMLPEEVEEVIGNKPESDILVHTAYDESTDENVMLLTSDAPEYKPWALVIQDSNGENKIKMLSGGSPKKKRK

SEQ ID NO: 600 - protein, 1853 aa, synthetic construct; identical to SEQ ID NO: 553

SEQ ID NO: 601 - protein, 1853 aa, synthetic construct
MKRTADGSEFESPKKKRKVSSETGPVAVDPTLRRRIEPHEFEVFFDPRELRKETCLLYEIKWGTSHKIWRHSSKNTTKHVEVNFIEKFTSERHFCPSTSCSITWFLSWSPCGECSKAITEFLSQHPNVTLVIYVARLYHHMDQQNRQGLRDLVNSGVTIQIMTAPEYDYCWRNFVNYPPGKEAHWPRYPPLWMKLYALELHAGILGLPPCLNILRRKQPQLTFFTIALQSCHYQRLPPHILWATGLKSGGSSGGSSGSETPGTSESATPESSGGSSGGSDKKYSIGLAIGTNSVGWAVITDEYKVPSKKFKVLGNTDRHSIKKNLIGALLFDSGETAEATRLKRTARRRYTRRKNRICYLQEIFSNEMAKVDDSFFHRLEESFLVEEDKKHERHPIFGNIVDEVAYHEKYPTIYHLRKKLVDSTDKADLRLIYLALAHMIKFRGHFLIEGDLNPDNSDVDKLFIQLVQTYNQLFEENPINASGVDAKAILSARLSKSRRLENLIAQLPGEKKNGLFGNLIALSLGLTPNFKSNFDLAEDAKLQLSKDTYDDDLDNLLAQIGDQYADLFLAAKNLSDAILLSDILRVNTEITKAPLSASMIKRYDEHHQDLTLLKALVRQQLPEKYKEIFFDQSKNGYAGYIDGGASQEEFYKFIKPILEKMDGTEELLVKLNREDLLRKQRTFDNGSIPHQIHLGELHAILRRQEDFYPFLKDNREKIEKILTFRIPYYVGPLARGNSRFAWMTRKSEETITPWNFEEVVDKGASAQSFIERMTNFDKNLPNEKVLPKHSLLYEYFTVYNELTKVKYVTEGMRKPAFLSGEQKKAIVDLLFKTNRKVTVKQLKEDYFKKIECFDSVEISGVEDRFNASLGTYHDLLKIIKDKDFLDNEENEDILEDIVLTLTLFEDREMIEERLKTYAHLFDDKVMKQLKRRRYTGWGRLSRKLINGIRDKQSGKTILDFLKSDGFANRNFMQLIHDDSLTFKEDIQKAQVSGQGDSLHEHIANLAGSPAIKKGILQTVKVVDELVKVMGRHKPENIVIEMARENQTTQKGQKNSRERMKRIEEGIKELGSQILKEHPVENTQLQNEKLYLYYLQNGRDMYVDQELDINRLSDYDVDHIVPQSFLKDDSIDNKVLTRSDKNRGKSDNVPSEEVVKKMKNYWRQLLNAKLITQRKFDNLTKAERGGLSELDKAGFIKRQLVETRQITKHVAQILDSRMNTKYDENDKLIREVKVITLKSKLVSDFRKDFQFYKVREINNYHHAHDAYLNAVVGTALIKKYPKLESEFVYGDYKVYDVRKMIAKSEQEIGKATAKYFFYSNIMNFFKTEITLANGEIRKRPLIETNGETGEIVWDKGRDFATVRKVLSMPQVNIVKKTEVQTGGFSKESILPKRNSDKLIARKKDWDPKKYGGFDSPTVAYSVLVVAKVEKGKSKKLKSVKELLGITIMERSSFEKNPIDFLEAKGYKEVKKDLIIKLPKYSLFELENGRKRMLASAGELQKGNELALPSKYVNFLYLASHYEKLKGSPEDNEQKQLFVEQHKHYLDEIIEQISEFSKRVILADANLDKVLSAYNKHRDKPIREQAENIIHLFTLTNLGAPAAFKYFDTTIDRKRYTSTKEVLDATLIHQSITGLYETRIDLSQLGGDSGGSGGSGGSTNLSDIIEKETGKQLVIQESILMLPEEVEEVIGNKPESDILVHTAYDESTDENVMLLTSDAPEYKPWALVIQDSNGENKIKMLSGGSGGSGGSTNLSDIIEKETGKQLVIQESILMLPEEVEEVIGNKPESDILVHTAYDESTDENVMLLTSDAPEYKPWALVIQDSNGENKIKMLSGGSKRTADGSEFEPKKKRKV

SEQ ID NO: 602 - protein, 1853 aa, synthetic construct
MKRTADGSEFESPKKKRKVSSETGPVAVDPTLRRRIEPHEFEVFFDPRELRKEACLLYEIKWGTSHKIWRNSGKNTTKHVEVNFIEKFTSERHFCPSISCSITWFLSWSPCWECSKAIREFLSQHPNVTLVIYVARLFQHMDQQNRQGLRDLVNSGVTIQIMTASEYDHCWRNFVNYPPGKEAHWPRYPPLWMKLYALELHAGILGLPPCLNILRRKQPQLTFFTIALQSCHYQRLPPHILWATGLKSGGSSGGSSGSETPGTSESATPESSGGSSGGSDKKYSIGLAIGTNSVGWAVITDEYKVPSKKFKVLGNTDRHSIKKNLIGALLFDSGETAEATRLKRTARRRYTRRKNRICYLQEIFSNEMAKVDDSFFHRLEESFLVEEDKKHERHPIFGNIVDEVAYHEKYPTIYHLRKKLVDSTDKADLRLIYLALAHMIKFRGHFLIEGDLNPDNSDVDKLFIQLVQTYNQLFEENPINASGVDAKAILSARLSKSRRLENLIAQLPGEKKNGLFGNLIALSLGLTPNFKSNFDLAEDAKLQLSKDTYDDDLDNLLAQIGDQYADLFLAAKNLSDAILLSDILRVNTEITKAPLSASMIKRYDEHHQDLTLLKALVRQQLPEKYKEIFFDQSKNGYAGYIDGGASQEEFYKFIKPILEKMDGTEELLVKLNREDLLRKQRTFDNGSIPHQIHLGELHAILRRQEDFYPFLKDNREKIEKILTFRIPYYVGPLARGNSRFAWMTRKSEETITPWNFEEVVDKGASAQSFIERMTNFDKNLPNEKVLPKHSLLYEYFTVYNELTKVKYVTEGMRKPAFLSGEQKKAIVDLLFKTNRKVTVKQLKEDYFKKIECFDSVEISGVEDRFNASLGTYHDLLKIIKDKDFLDNEENEDILEDIVLTLTLFEDREMIEERLKTYAHLFDDKVMKQLKRRRYTGWGRLSRKLINGIRDKQSGKTILDFLKSDGFANRNFMQLIHDDSLTFKEDIQKAQVSGQGDSLHEHIANLAGSPAIKKGILQTVKVVDELVKVMGRHKPENIVIEMARENQTTQKGQKNSRERMKRIEEGIKELGSQILKEHPVENTQLQNEKLYLYYLQNGRDMYVDQELDINRLSDYDVDHIVPQSFLKDDSIDNKVLTRSDKNRGKSDNVPSEEVVKKMKNYWRQLLNAKLITQRKFDNLTKAERGGLSELDKAGFIKRQLVETRQITKHVAQILDSRMNTKYDENDKLIREVKVITLKSKLVSDFRKDFQFYKVREINNYHHAHDAYLNAVVGTALIKKYPKLESEFVYGDYKVYDVRKMIAKSEQEIGKATAKYFFYSNIMNFFKTEITLANGEIRKRPLIETNGETGEIVWDKGRDFATVRKVLSMPQVNIVKKTEVQTGGFSKESILPKRNSDKLIARKKDWDPKKYGGFDSPTVAYSVLVVAKVEKGKSKKLKSVKELLGITIMERSSFEKNPIDFLEAKGYKEVKKDLIIKLPKYSLFELENGRKRMLASAGELQKGNELALPSKYVNFLYLASHYEKLKGSPEDNEQKQLFVEQHKHYLDEIIEQISEFSKRVILADANLDKVLSAYNKHRDKPIREQAENIIHLFTLTNLGAPAAFKYFDTTIDRKRYTSTKEVLDATLIHQSITGLYETRIDLSQLGGDSGGSGGSGGSTNLSDIIEKETGKQLVIQESILMLPEEVEEVIGNKPESDILVHTAYDESTDENVMLLTSDAPEYKPWALVIQDSNGENKIKMLSGGSGGSGGSTNLSDIIEKETGKQLVIQESILMLPEEVEEVIGNKPESDILVHTAYDESTDENVMLLTSDAPEYKPWALVIQDSNGENKIKMLSGGSKRTADGSEFEPKKKRKV

SEQ ID NO: 603 - skipped

SEQ ID NO: 604 - DNA, 684 bp, Rattus sp.
  source 1..684: mol_type = other DNA
tcctcagagactgggcctgtcgccgtcgatccaaccctgcgccgccggattgaacctcacgagtttgaagtgttctttgacccccgggagctgagaaaggagacatgcctgctgtacgagatcaactggggaggcaggcactccatctggaggcacacctctcagaacacaaataagcacgtggaggtgaacttcatcgagaagtttaccacagagcggtacttctgccccaataccagatgtagcatcacatggtttctgagctggtccccttgcggagagtgtagcagggccatcaccgagttcctgtccagatatccacacgtgacactgtttatctacatcgccaggctgtatcaccacgcagacccaaggaataggcagggcctgcgcgatctgatcagctccggcgtgaccatccagatcatgacagagcaggagtccggctactgctggcggaacttcgtgaattattctcctagcaacgaggcccactggcctaggtacccacacctgtgggtgcgcctgtacgtgctggagctgtattgcatcatcctgggcctgcccccttgtctgaatatcctgcggagaaagcagccccagctgaccttctttacaatcgccctgcagtcttgtcactatcagaggctgccaccccacatcctgtgggccacaggcctgaag

SEQ ID NO: 605 - DNA, 686 bp, synthetic construct
  source 1..686: mol_type = other DNA
agcagtgaaaccggaccagtggcagtggacccaaccctgaggagacggattgagccccatgaatttgaagtgttctttgacccaagggagctgaggaaggagacatgcctgctgtacgagatcaagtggggcacaagccacaagatctggcgccacagctccaagaacaccacaaagcacgtggaagtgaatttcatcgagaagtttacctccgagcggcacttctgcccctctaccagctgttccatcacatggtttctgtcttggagcccttgcggcgagtgttccaaggccatcaccgagttcctgtctcagcaccctaacgtgaccctggtcatctacgtggcccggctgtatcaccacatggaccagcagaacaggcagggcctgcgcgatctggtgaattctggcgtgaccatccagatcatgacagccccagagtacgactattgctggcggaacttcgtgaattatccacctggcaaggaggcacactggccaagatacccacccctgtggatgaagctgtatgcactggagctgcacgcaggaatcctgggcctgcctccatgtctgaatatcctgcggagaaagcagccccagctgacatttttcaccattgctctgcagtcttgtcactatcagcggctgcctcctcatattctgtgggctacaggcctttgaaa

SEQ ID NO: 606 - DNA, 686 bp, synthetic construct
  source 1..686: mol_type = other DNA
tcatcagaaacaggaccagtcgccgtggacccaacactgaggagaaggattgagccccatgaatttgaagtctttttcgaccccagggagctgaggaaggaggcatgcctgctgtacgagatcaagtggggcacaagccacaagatctggcgcaacagcggcaagaacaccacaaagcacgtggaagtgaatttcatcgagaagtttacctccgagcggcacttctgcccctctatcagctgttccatcacatggtttctgtcttggagcccttgctgggagtgttccaaggccatccgcgagttcctgtctcagcaccctaacgtgaccctggtcatctacgtggcccggctgtttcaacacatggaccagcagaacaggcagggcctgcgcgatctggtgaattctggcgtgaccatccagatcatgacagcctcagagtacgaccattgctggcggaacttcgtgaattatccacctggcaaggaggcacactggccaagatacccacccctgtggatgaagctgtatgcactggagctgcacgcaggaatcctgggcctgcctccatgtctgaatatcctgcggagaaagcagccccagctgacatttttcactatcgcactgcagagctgtcattaccagagactgcctcctcatatcctgtgggctacaggcctttgaaa

SEQ ID NO: 607 - DNA, 686 bp, synthetic construct
  source 1..686: mol_type = other DNA
agcagcgagacaggacccgtggcagtggaccctacactgaggaggaggattgagcccgaatttttcaacaggaactacgaccccagagagctgcggaaggagacatacctgctgtatgagatcaagtggggcaaggagtccaagatctggcggcacacctctaacaatagaacacagcacgccgaggtgaacttcctggagaacttctttaatgagctgtactttaatccttctacccactgcagcatcacatggttcctgagctggtccccatgcggcgagtgttctaaggccatcgtggagtttctgaaggagcaccccaacgtgaatctggagatctacgtggccaggctgtatctgtgcgaggacgagaggaacaggcagggcctgcgggatctggtgaatagcggcgtgaccatcagaatcatgaacctgcctgactacaattattgttggcgcacattcgtgtcccaccagggaggcgacgaggattattggccaaggcactttgcaccatgggtgcgcctgtacgtgctggagctgtattgcatcatcctgggcctgcccccttgtctgaacatcctgcggagaaagcagccccagctgacattcttcaccatcgcactgcagagttgtcattaccagcgactgcctcctcatatcctgtgggctacaggcctttgaaa

SEQ ID NO: 608 - DNA, 686 bp, synthetic construct
  source 1..686: mol_type = other DNA
tcatcagagaccggacctgtggcagtggacccaaccctgcgacggagaatcgagcccttttactttcagttcaacaacgacccaagagcctgccggagaaagacctacctgtgctatgagctgaagcaggacggctctacctgggtgtggaagcggacactgcacaacaagggcagacacgccgagatctgcttcctggagaagatcagctccctggagaagctggaccctgcccagcactacaggatcacatggtatatgtcttggagcccatgctccaactgtgcccagaagatcgtggattttctgaaggagcacccacacgtgaatctgcggatctacgtggccagactgtactatcacgaggaggagaggtatcaggagggcctgaggaacctgaggcgctccggcgtgtctatcagagtgatggacctgcccgatttcgagcactgctgggagacattcgtggataacggaggaggacctttccagccatggcccggcctggaggagctgaatagcaagcagctgtcccggagactgcaggcaggaatcctgggcctgcccccttgtctgaatatcctgaggcgcaagcagccccagctgacatttttcaccatcgcactgcagagttgtcattatcagcgactgcctcctcatatcctgtgggctacaggcctttgaaa

SEQ ID NO: 609 - DNA, 686 bp, synthetic construct
  source 1..686: mol_type = other DNA
agcagcgagaccggacctgtggcagtggacccaaccctgagaagacgcattgagccatttcattttcagtttaacaacgaccccagagcctaccggagaaagacctacctgtgctatgagctgaagcaggacggctccacctgggtgctggatcggacactgagaaacaagggccggcacgccgagatctgtttcctggacaagatcaattcctgggagaggctggatcccgcccagcactaccgcgtgacatggtatatgagctggtccccttgctctaactgtgcccagcaggtggtggatttcctgaaggagcacccacacgtgaatctgcggatctttgccgccagactgtactatcacgagcagaggcgctatcaggagggcctgcggagcctgaggggaagcggagtgcctgtggccgtgatgaccctgccagacttcgagcactgctgggagacatttgtggatcacggcggccggccattccagccatgggacggcctggaggagctgaactctaggagcctgtcccggagactgcaggcaggaatcctgggcctgcccccttgtctgaatatcctgaggcgcaagcagccccagctgaccttttttaccatcgcactgcagagttgtcactaccagagactgcctcctcatatcctgtgggctacaggcctttgaaa

SEQ ID NO: 610 - DNA, 1368 bp, Rattus sp.
  source 1..1368: mol_type = other DNA
tcctcagagactgggcctgtcgccgtcgatccaaccctgcgccgccggattgaacctcacgagtttgaagtgttctttgacccccgggagctgagaaaggagacatgcctgctgtacgagatcaactggggaggcaggcactccatctggaggcacacctctcagaacacaaataagcacgtggaggtgaacttcatcgagaagtttaccacagagcggtacttctgccccaataccagatgtagcatcacatggtttctgagctggtccccttgcggagagtgtagcagggccatcaccgagttcctgtccagatatccacacgtgacactgtttatctacatcgccaggctgtatcaccacgcagacccaaggaataggcagggcctgcgcgatctgatcagctccggcgtgaccatccagatcatgacagagcaggagtccggctactgctggcggaacttcgtgaattattctcctagcaacgaggcccactggcctaggtacccacacctgtgggtgcgcctgtacgtgctggagctgtattgcatcatcctgggcctgcccccttgtctgaatatcctgcggagaaagcagccccagctgaccttctttacaatcgccctgcagtcttgtcactatcagaggctgccaccccacatcctgtgggccacaggcctgaagtcctcagagactgggcctgtcgccgtcgatccaaccctgcgccgccggattgaacctcacgagtttgaagtgttctttgacccccgggagctgagaaaggagacatgcctgctgtacgagatcaactggggaggcaggcactccatctggaggcacacctctcagaacacaaataagcacgtggaggtgaacttcatcgagaagtttaccacagagcggtacttctgccccaataccagatgtagcatcacatggtttctgagctggtccccttgcggagagtgtagcagggccatcaccgagttcctgtccagatatccacacgtgacactgtttatctacatcgccaggctgtatcaccacgcagacccaaggaataggcagggcctgcgcgatctgatcagctccggcgtgaccatccagatcatgacagagcaggagtccggctactgctggcggaacttcgtgaattattctcctagcaacgaggcccactggcctaggtacccacacctgtgggtgcgcctgtacgtgctggagctgtattgcatcatcctgggcctgcccccttgtctgaatatcctgcggagaaagcagccccagctgaccttctttacaatcgccctgcagtcttgtcactatcagaggctgccaccccacatcctgtgggccacaggcctgaag

SEQ ID NO: 611 - DNA, 684 bp, synthetic construct
  source 1..684: mol_type = other DNA
agcagtgaaaccggaccagtggcagtggacccaaccctgaggagacggattgagccccatgaatttgaagtgttctttgacccaagggagctgaggaaggagacatgcctgctgtacgagatcaagtggggcacaagccacaagatctggcgccacagctccaagaacaccacaaagcacgtggaagtgaatttcatcgagaagtttacctccgagcggcacttctgcccctctaccagctgttccatcacatggtttctgtcttggagcccttgcggcgagtgttccaaggccatcaccgagttcctgtctcagcaccctaacgtgaccctggtcatctacgtggcccggctgtatcaccacatggaccagcagaacaggcagggcctgcgcgatctggtgaattctggcgtgaccatccagatcatgacagccccagagtacgactattgctggcggaacttcgtgaattatccacctggcaaggaggcacactggccaagatacccacccctgtggatgaagctgtatgcactggagctgcacgcaggaatcctgggcctgcctccatgtctgaatatcctgcggagaaagcagccccagctgacatttttcaccattgctctgcagtcttgtcactatcagcggctgcctcctcatattctgtgggctacaggccttaaa

SEQ ID NO: 612 - DNA, 684 bp, synthetic construct
  source 1..684: mol_type = other DNA
tcatcagaaacaggaccagtcgccgtggacccaacactgaggagaaggattgagccccatgaatttgaagtctttttcgaccccagggagctgaggaaggaggcatgcctgctgtacgagatcaagtggggcacaagccacaagatctggcgcaacagcggcaagaacaccacaaagcacgtggaagtgaatttcatcgagaagtttacctccgagcggcacttctgcccctctatcagctgttccatcacatggtttctgtcttggagcccttgctgggagtgttccaaggccatccgcgagttcctgtctcagcaccctaacgtgaccctggtcatctacgtggcccggctgtttcaacacatggaccagcagaacaggcagggcctgcgcgatctggtgaattctggcgtgaccatccagatcatgacagcctcagagtacgaccattgctggcggaacttcgtgaattatccacctggcaaggaggcacactggccaagatacccacccctgtggatgaagctgtatgcactggagctgcacgcaggaatcctgggcctgcctccatgtctgaatatcctgcggagaaagcagccccagctgacatttttcactatcgcactgcagagctgtcattaccagagactgcctcctcatatcctgtgggctacaggccttaaa

SEQ ID NO: 613 - DNA, 684 bp, synthetic construct
  source 1..684: mol_type = other DNA
agcagcgagacaggacccgtggcagtggaccctacactgaggaggaggattgagcccgaatttttcaacaggaactacgaccccagagagctgcggaaggagacatacctgctgtatgagatcaagtggggcaaggagtccaagatctggcggcacacctctaacaatagaacacagcacgccgaggtgaacttcctggagaacttctttaatgagctgtactttaatccttctacccactgcagcatcacatggttcctgagctggtccccatgcggcgagtgttctaaggccatcgtggagtttctgaaggagcaccccaacgtgaatctggagatctacgtggccaggctgtatctgtgcgaggacgagaggaacaggcagggcctgcgggatctggtgaatagcggcgtgaccatcagaatcatgaacctgcctgactacaattattgttggcgcacattcgtgtcccaccagggaggcgacgaggattattggccaaggcactttgcaccatgggtgcgcctgtacgtgctggagctgtattgcatcatcctgggcctgcccccttgtctgaacatcctgcggagaaagcagccccagctgacattcttcaccatcgcactgcagagttgtcattaccagcgactgcctcctcatatcctgtgggctacaggccttaaa

SEQ ID NO: 614 - DNA, 684 bp, synthetic construct
  source 1..684: mol_type = other DNA
tcatcagagaccggacctgtggcagtggacccaaccctgcgacggagaatcgagcccttttactttcagttcaacaacgacccaagagcctgccggagaaagacctacctgtgctatgagctgaagcaggacggctctacctgggtgtggaagcggacactgcacaacaagggcagacacgccgagatctgcttcctggagaagatcagctccctggagaagctggaccctgcccagcactacaggatcacatggtatatgtcttggagcccatgctccaactgtgcccagaagatcgtggattttctgaaggagcacccacacgtgaatctgcggatctacgtggccagactgtactatcacgaggaggagaggtatcaggagggcctgaggaacctgaggcgctccggcgtgtctatcagagtgatggacctgcccgatttcgagcactgctgggagacattcgtggataacggaggaggacctttccagccatggcccggcctggaggagctgaatagcaagcagctgtcccggagactgcaggcaggaatcctgggcctgcccccttgtctgaatatcctgaggcgcaagcagccccagctgacatttttcaccatcgcactgcagagttgtcattatcagcgactgcctcctcatatcctgtgggctacaggccttaaa

SEQ ID NO: 615 - DNA, 684 bp, synthetic construct
  source 1..684: mol_type = other DNA
agcagcgagaccggacctgtggcagtggacccaaccctgagaagacgcattgagccatttcattttcagtttaacaacgaccccagagcctaccggagaaagacctacctgtgctatgagctgaagcaggacggctccacctgggtgctggatcggacactgagaaacaagggccggcacgccgagatctgtttcctggacaagatcaattcctgggagaggctggatcccgcccagcactaccgcgtgacatggtatatgagctggtccccttgctctaactgtgcccagcaggtggtggatttcctgaaggagcacccacacgtgaatctgcggatctttgccgccagactgtactatcacgagcagaggcgctatcaggagggcctgcggagcctgaggggaagcggagtgcctgtggccgtgatgaccctgccagacttcgagcactgctgggagacatttgtggatcacggcggccggccattccagccatgggacggcctggaggagctgaactctaggagcctgtcccggagactgcaggcaggaatcctgggcctgcccccttgtctgaatatcctgaggcgcaagcagccccagctgaccttttttaccatcgcactgcagagttgtcactaccagagactgcctcctcatatcctgtgggctacaggccttaaa

SEQ ID NO: 616 - DNA, 5559 bp, synthetic construct
  source 1..5559: mol_type = other DNA
atgaaacggacagccgacggaagcgagttcgagtcaccaaagaagaagcggaaagtctcctcagagactgggcctgtcgccgtcgatccaaccctgcgccgccggattgaacctcacgagtttgaagtgttctttgacccccgggagctgagaaaggagacatgcctgctgtacgagatcaactggggaggcaggcactccatctggaggcacacctctcagaacacaaataagcacgtggaggtgaacttcatcgagaagtttaccacagagcggtacttctgccccaataccagatgtagcatcacatggtttctgagctggtccccttgcggagagtgtagcagggccatcaccgagttcctgtccagatatccacacgtgacactgtttatctacatcgccaggctgtatcaccacgcagacccaaggaataggcagggcctgcgcgatctgatcagctccggcgtgaccatccagatcatgacagagcaggagtccggctactgctggcggaacttcgtgaattattctcctagcaacgaggcccactggcctaggtacccacacctgtgggtgcgcctgtacgtgctggagctgtattgcatcatcctgggcctgcccccttgtctgaatatcctgcggagaaagcagccccagctgaccttctttacaatcgccctgcagtcttgtcactatcagaggctgccaccccacatcctgtgggccacaggcctgaagtctggaggatctagcggaggatcctctggcagcgagacaccaggaacaagcgagtcagcaacaccagagagcagtggcggcagcagcggcggcagcgacaagaagtacagcatcggcctggacatcggcaccaactctgtgggctgggccgtgatcaccgacgagtacaaggtgcccagcaagaaattcaaggtgctgggcaacaccgaccggcacagcatcaagaagaacctgatcggagccctgctgttcgacagcggcgaaacagccgaggccacccggctgaagagaaccgccagaagaagatacaccagacggaagaaccggatctgctatctgcaagagatcttcagcaacgagatggccaaggtggacgacagcttcttccacagactggaagagtccttcctggtggaagaggataagaagcacgagcggcaccccatcttcggcaacatcgtggacgaggtggcctaccacgagaagtaccccaccatctaccacctgagaaagaaactggtggacagcaccgacaaggccgacctgcggctgatctatctggccctggcccacatgatcaagttccggggccacttcctgatcgagggcgacctgaaccccgacaacagcgacgtggacaagctgttcatccagctggtgcagacctacaaccagctgttcgaggaaaaccccatcaacgccagcggcgtggacgccaaggccatcctgtctgccagactgagcaagagcagacggctggaaaatctgatcgcccagctgcccggcgagaagaagaatggcctgttcggaaacctgattgccctgagcctgggcctgacccccaacttcaagagcaacttcgacctggccgaggatgccaaactgcagctgagcaaggacacctacgacgacgacctggacaacctgctggcccagatcggcgaccagtacgccgacctgtttctggccgccaagaacctgtccgacgccatcctgctgagcgacatcctgagagtgaacaccgagatcaccaaggcccccctgagcgcctctatgatcaagagatacgacgagcaccaccaggacctgaccctgctgaaagctctcgtgcggcagcagctgcctgagaagtacaaagagattttcttcgaccagagcaagaacggctacgccggctacattgacggcggagccagccaggaagagttctacaagttcatcaagcccatcctggaaaagatggacggcaccgaggaactgctcgtgaagctgaacagagaggacctgctgcggaagcagcggaccttcgacaacggcagcatcccccaccagatccacctgggagagctgcacgccattctgcggcggcaggaagatttttacccattcctgaaggacaaccgggaaaagatcgagaagatcctgaccttccgcatcccctactacgtgggccctctggccaggggaaacagcagattcgcctggatgaccagaaagagcgaggaaaccatcaccccctggaacttcgaggaagtggtggacaagggcgcttccgcccagagcttcatcgagcggatgaccaacttcgataagaacctgcccaacgagaaggtgctgcccaagcacagcctgctgtacgagtacttcaccgtgtataacgagctgaccaaagtgaaatacgtgaccgagggaatgagaaagcccgccttcctgagcggcgagcagaaaaaggccatcgtggacctgctgttcaagaccaaccggaaagtgaccgtgaagcagctgaaagaggactacttcaagaaaatcgagtgcttcgactccgtggaaatctccggcgtggaagatcggttcaacgcctccctgggcacataccacgatctgctgaaaattatcaaggacaaggacttcctggacaatgaggaaaacgaggacattctggaagatatcgtgctgaccctgacactgtttgaggacagagagatgatcgaggaacggctgaaaacctatgcccacctgttcgacgacaaagtgatgaagcagctgaagcggcggagatacaccggctggggcaggctgagccggaagctgatcaacggcatccgggacaagcagtccggcaagacaatcctggatttcctgaagtccgacggcttcgccaacagaaacttcatgcagctgatccacgacgacagcctgacctttaaagaggacatccagaaagcccaggtgtccggccagggcgatagcctgcacgagcacattgccaatctggccggcagccccgccattaagaagggcatcctgcagacagtgaaggtggtggacgagctcgtgaaagtgatgggccggcacaagcccgagaacatcgtgatcgaaatggccagagagaaccagaccacccagaagggacagaagaacagccgcgagagaatgaagcggatcgaagagggcatcaaagagctgggcagccagatcctgaaagaacaccccgtggaaaacacccagctgcagaacgagaagctgtacctgtactacctgcagaatgggcgggatatgtacgtggaccaggaactggacatcaaccggctgtccgactacgatgtggaccatatcgtgcctcagagctttctgaaggacgactccatcgacaacaaggtgctgaccagaagcgacaagaaccggggcaagagcgacaacgtgccctccgaagaggtcgtgaagaagatgaagaactactggcggcagctgctgaacgccaagctgattacccagagaaagttcgacaatctgaccaaggccgagagaggcggcctgagcgaactggataaggccggcttcatcaagagacagctggtggaaacccggcagatcacaaagcacgtggcacagatcctggactcccggatgaacactaagtacgacgagaatgacaagctgatccgggaagtgaaagtgatcaccctgaagtccaagctggtgtccgatttccggaaggatttccagttttacaaagtgcgcgagatcaacaactaccaccacgcccacgacgcctacctgaacgccgtcgtgggaaccgccctgatcaaaaagtaccctaagctggaaagcgagttcgtgtacggcgactacaaggtgtacgacgtgcggaagatgatcgccaagagcgagcaggaaatcggcaaggctaccgccaagtacttcttctacagcaacatcatgaactttttcaagaccgagattaccctggccaacggcgagatccggaagcggcctctgatcgagacaaacggcgaaaccggggagatcgtgtgggataagggccgggattttgccaccgtgcggaaagtgctgagcatgccccaagtgaatatcgtgaaaaagaccgaggtgcagacaggcggcttcagcaaagagtctatcctgcccaagaggaacagcgataagctgatcgccagaaagaaggactgggaccctaagaagtacggcggcttcgacagccccaccgtggcctattctgtgctggtggtggccaaagtggaaaagggcaagtccaagaaactgaagagtgtgaaagagctgctggggatcaccatcatggaaagaagcagcttcgagaagaatcccatcgactttctggaagccaagggctacaaagaagtgaaaaaggacctgatcatcaagctgcctaagtactccctgttcgagctggaaaacggccggaagagaatgctggcctctgccggcgaactgcagaagggaaacgaactggccctgccctccaaatatgtgaacttcctgtacctggccagccactatgagaagctgaagggctcccccgaggataatgagcagaaacagctgtttgtggaacagcacaagcactacctggacgagatcatcgagcagatcagcgagttctccaagagagtgatcctggccgacgctaatctggacaaagtgctgtccgcctacaacaagcaccgggataagcccatcagagagcaggccgagaatatcatccacctgtttaccctgaccaatctgggagcccctgccgccttcaagtactttgacaccaccatcgaccggaagaggtacaccagcaccaaagaggtgctggacgccaccctgatccaccagagcatcaccggcctgtacgagacacggatcgacctgtctcagctgggaggtgacagcggcgggagcggcgggagcggggggagcactaatctgagcgacatcattgagaaggagactgggaaacagctggtcattcaggagtccatcctgatgctgcctgaggaggtggaggaagtgatcggcaacaagccagagtctgacatcctggtgcacaccgcctacgacgagtccacagatgagaatgtgatgctgctgacctctgacgcccccgagtataagccttgggccctggtcatccaggattctaacggcgagaataagatcaagatgctgagcggaggatccggaggatctggaggcagcaccaacctgtctgacatcatcgagaaggagacaggcaagcagctggtcatccaggagagcatcctgatgctgcccgaagaagtcgaagaagtgatcggaaacaagcctgagagcgatatcctggtccataccgcctacgacgagagtaccgacgaaaatgtgatgctgctgacatccgacgccccagagtataagccctgggctctggtcatccaggattccaacggagagaacaaaatcaaaatgctgtctggcggctcaaaaagaaccgccgacggcagcgaattcgagcccaagaagaagaggaaagtc

SEQ ID NO: 617 - DNA, 5559 bp, synthetic construct
  source 1..5559: mol_type = other DNA
atgaaacggacagccgacggaagcgagttcgagtcaccaaagaagaagcggaaagtcagcagtgaaaccggaccagtggcagtggacccaaccctgaggagacggattgagccccatgaatttgaagtgttctttgacccaagggagctgaggaaggagacatgcctgctgtacgagatcaagtggggcacaagccacaagatctggcgccacagctccaagaacaccacaaagcacgtggaagtgaatttcatcgagaagtttacctccgagcggcacttctgcccctctaccagctgttccatcacatggtttctgtcttggagcccttgcggcgagtgttccaaggccatcaccgagttcctgtctcagcaccctaacgtgaccctggtcatctacgtggcccggctgtatcaccacatggaccagcagaacaggcagggcctgcgcgatctggtgaattctggcgtgaccatccagatcatgacagccccagagtacgactattgctggcggaacttcgtgaattatccacctggcaaggaggcacactggccaagatacccacccctgtggatgaagctgtatgcactggagctgcacgcaggaatcctgggcctgcctccatgtctgaatatcctgcggagaaagcagccccagctgacatttttcaccattgctctgcagtcttgtcactatcagcggctgcctcctcatattctgtgggctacaggccttaaatctggaggatctagcggaggatcctctggcagcgagacaccaggaacaagcgagtcagcaacaccagagagcagtggcggcagcagcggcggcagcgacaagaagtacagcatcggcctggacatcggcaccaactctgtgggctgggccgtgatcaccgacgagtacaaggtgcccagcaagaaattcaaggtgctgggcaacaccgaccggcacagcatcaagaagaacctgatcggagccctgctgttcgacagcggcgaaacagccgaggccacccggctgaagagaaccgccagaagaagatacaccagacggaagaaccggatctgctatctgcaagagatcttcagcaacgagatggccaaggtggacgacagcttcttccacagactggaagagtccttcctggtggaagaggataagaagcacgagcggcaccccatcttcggcaacatcgtggacgaggtggcctaccacgagaagtaccccaccatctaccacctgagaaagaaactggtggacagcaccgacaaggccgacctgcggctgatctatctggccctggcccacatgatcaagttccggggccacttcctgatcgagggcgacctgaaccccgacaacagcgacgtggacaagctgttcatccagctggtgcagacctacaaccagctgttcgaggaaaaccccatcaacgccagcggcgtggacgccaaggccatcctgtctgccagactgagcaagagcagacggctggaaaatctgatcgcccagctgcccggcgagaagaagaatggcctgttcggaaacctgattgccctgagcctgggcctgacccccaacttcaagagcaacttcgacctggccgaggatgccaaactgcagctgagcaaggacacctacgacgacgacctggacaacctgctggcccagatcggcgaccagtacgccgacctgtttctggccgccaagaacctgtccgacgccatcctgctgagcgacatcctgagagtgaacaccgagatcaccaaggcccccctgagcgcctctatgatcaagagatacgacgagcaccaccaggacctgaccctgctgaaagctctcgtgcggcagcagctgcctgagaagtacaaagagattttcttcgaccagagcaagaacggctacgccggctacattgacggcggagccagccaggaagagttctacaagttcatcaagcccatcctggaaaagatggacggcaccgaggaactgctcgtgaagctgaacagagaggacctgctgcggaagcagcggaccttcgacaacggcagcatcccccaccagatccacctgggagagctgcacgccattctgcggcggcaggaagatttttacccattcctgaaggacaaccgggaaaagatcgagaagatcctgaccttccgcatcccctactacgtgggccctctggccaggggaaacagcagattcgcctggatgaccagaaagagcgaggaaaccatcaccccctggaacttcgaggaagtggtggacaagggcgcttccgcccagagcttcatcgagcggatgaccaacttcgataagaacctgcccaacgagaaggtgctgcccaagcacagcctgctgtacgagtacttcaccgtgtataacgagctgaccaaagtgaaatacgtgaccgagggaatgagaaagcccgccttcctgagcggcgagcagaaaaaggccatcgtggacctgctgttcaagaccaaccggaaagtgaccgtgaagcagctgaaagaggactacttcaagaaaatcgagtgcttcgactccgtggaaatctccggcgtggaagatcggttcaacgcctccctgggcacataccacgatctgctgaaaattatcaaggacaaggacttcctggacaatgaggaaaacgaggacattctggaagatatcgtgctgaccctgacactgtttgaggacagagagatgatcgaggaacggctgaaaacctatgcccacctgttcgacgacaaagtgatgaagcagctgaagcggcggagatacaccggctggggcaggctgagccggaagctgatcaacggcatccgggacaagcagtccggcaagacaatcctggatttcctgaagtccgacggcttcgccaacagaaacttcatgcagctgatccacgacgacagcctgacctttaaagaggacatccagaaagcccaggtgtccggccagggcgatagcctgcacgagcacattgccaatctggccggcagccccgccattaagaagggcatcctgcagacagtgaaggtggtggacgagctcgtgaaagtgatgggccggcacaagcccgagaacatcgtgatcgaaatggccagagagaaccagaccacccagaagggacagaagaacagccgcgagagaatgaagcggatcgaagagggcatcaaagagctgggcagccagatcctgaaagaacaccccgtggaaaacacccagctgcagaacgagaagctgtacctgtactacctgcagaatgggcgggatatgtacgtggaccaggaactggacatcaaccggctgtccgactacgatgtggaccatatcgtgcctcagagctttctgaaggacgactccatcgacaacaaggtgctgaccagaagcgacaagaaccggggcaagagcgacaacgtgccctccgaagaggtcgtgaagaagatgaagaactactggcggcagctgctgaacgccaagctgattacccagagaaagttcgacaatctgaccaaggccgagagaggcggcctgagcgaactggataaggccggcttcatcaagagacagctggtggaaacccggcagatcacaaagcacgtggcacagatcctggactcccggatgaacactaagtacgacgagaatgacaagctgatccgggaagtgaaagtgatcaccctgaagtccaagctggtgtccgatttccggaaggatttccagttttacaaagtgcgcgagatcaacaactaccaccacgcccacgacgcctacctgaacgccgtcgtgggaaccgccctgatcaaaaagtaccctaagctggaaagcgagttcgtgtacggcgactacaaggtgtacgacgtgcggaagatgatcgccaagagcgagcaggaaatcggcaaggctaccgccaagtacttcttctacagcaacatcatgaactttttcaagaccgagattaccctggccaacggcgagatccggaagcggcctctgatcgagacaaacggcgaaaccggggagatcgtgtgggataagggccgggattttgccaccgtgcggaaagtgctgagcatgccccaagtgaatatcgtgaaaaagaccgaggtgcagacaggcggcttcagcaaagagtctatcctgcccaagaggaacagcgataagctgatcgccagaaagaaggactgggaccctaagaagtacggcggcttcgacagccccaccgtggcctattctgtgctggtggtggccaaagtggaaaagggcaagtccaagaaactgaagagtgtgaaagagctgctggggatcaccatcatggaaagaagcagcttcgagaagaatcccatcgactttctggaagccaagggctacaaagaagtgaaaaaggacctgatcatcaagctgcctaagtactccctgttcgagctggaaaacggccggaagagaatgctggcctctgccggcgaactgcagaagggaaacgaactggccctgccctccaaatatgtgaacttcctgtacctggccagccactatgagaagctgaagggctcccccgaggataatgagcagaaacagctgtttgtggaacagcacaagcactacctggacgagatcatcgagcagatcagcgagttctccaagagagtgatcctggccgacgctaatctggacaaagtgctgtccgcctacaacaagcaccgggataagcccatcagagagcaggccgagaatatcatccacctgtttaccctgaccaatctgggagcccctgccgccttcaagtactttgacaccaccatcgaccggaagaggtacaccagcaccaaagaggtgctggacgccaccctgatccaccagagcatcaccggcctgtacgagacacggatcgacctgtctcagctgggaggtgacagcggcgggagcggcgggagcggggggagcactaatctgagcgacatcattgagaaggagactgggaaacagctggtcattcaggagtccatcctgatgctgcctgaggaggtggaggaagtgatcggcaacaagccagagtctgacatcctggtgcacaccgcctacgacgagtccacagatgagaatgtgatgctgctgacctctgacgcccccgagtataagccttgggccctggtcatccaggattctaacggcgagaataagatcaagatgctgagcggaggatccggaggatctggaggcagcaccaacctgtctgacatcatcgagaaggagacaggcaagcagctggtcatccaggagagcatcctgatgctgcccgaagaagtcgaagaagtgatcggaaacaagcctgagagcgatatcctggtccataccgcctacgacgagagtaccgacgaaaatgtgatgctgctgacatccgacgccccagagtataagccctgggctctggtcatccaggattccaacggagagaacaaaatcaaaatgctgtctggcggctcaaaaagaaccgccgacggcagcgaattcgagcccaagaagaagaggaaagtc

SEQ ID NO: 618 - DNA, 5559 bp, synthetic construct
  source 1..5559: mol_type = other DNA
atgaaacggacagccgacggaagcgagttcgagtcaccaaagaagaagcggaaagtctcatcagaaacaggaccagtcgccgtggacccaacactgaggagaaggattgagccccatgaatttgaagtctttttcgaccccagggagctgaggaaggaggcatgcctgctgtacgagatcaagtggggcacaagccacaagatctggcgcaacagcggcaagaacaccacaaagcacgtggaagtgaatttcatcgagaagtttacctccgagcggcacttctgcccctctatcagctgttccatcacatggtttctgtcttggagcccttgctgggagtgttccaaggccatccgcgagttcctgtctcagcaccctaacgtgaccctggtcatctacgtggcccggctgtttcaacacatggaccagcagaacaggcagggcctgcgcgatctggtgaattctggcgtgaccatccagatcatgacagcctcagagtacgaccattgctggcggaacttcgtgaattatccacctggcaaggaggcacactggccaagatacccacccctgtggatgaagctgtatgcactggagctgcacgcaggaatcctgggcctgcctccatgtctgaatatcctgcggagaaagcagccccagctgacatttttcactatcgcactgcagagctgtcattaccagagactgcctcctcatatcctgtgggctacaggccttaaatctggaggatctagcggaggatcctctggcagcgagacaccaggaacaagcgagtcagcaacaccagagagcagtggcggcagcagcggcggcagcgacaagaagtacagcatcggcctggacatcggcaccaactctgtgggctgggccgtgatcaccgacgagtacaaggtgcccagcaagaaattcaaggtgctgggcaacaccgaccggcacagcatcaagaagaacctgatcggagccctgctgttcgacagcggcgaaacagccgaggccacccggctgaagagaaccgccagaagaagatacaccagacggaagaaccggatctgctatctgcaagagatcttcagcaacgagatggccaaggtggacgacagcttcttccacagactggaagagtccttcctggtggaagaggataagaagcacgagcggcaccccatcttcggcaacatcgtggacgaggtggcctaccacgagaagtaccccaccatctaccacctgagaaagaaactggtggacagcaccgacaaggccgacctgcggctgatctatctggccctggcccacatgatcaagttccggggccacttcctgatcgagggcgacctgaaccccgacaacagcgacgtggacaagctgttcatccagctggtgcagacctacaaccagctgttcgaggaaaaccccatcaacgccagcggcgtggacgccaaggccatcctgtctgccagactgagcaagagcagacggctggaaaatctgatcgcccagctgcccggcgagaagaagaatggcctgttcggaaacctgattgccctgagcctgggcctgacccccaacttcaagagcaacttcgacctggccgaggatgccaaactgcagctgagcaaggacacctacgacgacgacctggacaacctgctggcccagatcggcgaccagtacgccgacctgtttctggccgccaagaacctgtccgacgccatcctgctgagcgacatcctgagagtgaacaccgagatcaccaaggcccccctgagcgcctctatgatcaagagatacgacgagcaccaccaggacctgaccctgctgaaagctctcgtgcggcagcagctgcctgagaagtacaaagagattttcttcgaccagagcaagaacggctacgccggctacattgacggcggagccagccaggaagagttctacaagttcatcaagcccatcctggaaaagatggacggcaccgaggaactgctcgtgaagctgaacagagaggacctgctgcggaagcagcggaccttcgacaacggcagcatcccccaccagatccacctgggagagctgcacgccattctgcggcggcaggaagatttttacccattcctgaaggacaaccgggaaaagatcgagaagatcctgaccttccgcatcccctactacgtgggccctctggccaggggaaacagcagattcgcctggatgaccagaaagagcgaggaaaccatcaccccctggaacttcgaggaagtggtggacaagggcgcttccgcccagagcttcatcgagcggatgaccaacttcgataagaacctgcccaacgagaaggtgctgcccaagcacagcctgctgtacgagtacttcaccgtgtataacgagctgaccaaagtgaaatacgtgaccgagggaatgagaaagcccgccttcctgagcggcgagcagaaaaaggccatcgtggacctgctgttcaagaccaaccggaaagtgaccgtgaagcagctgaaagaggactacttcaagaaaatcgagtgcttcgactccgtggaaatctccggcgtggaagatcggttcaacgcctccctgggcacataccacgatctgctgaaaattatcaaggacaaggacttcctggacaatgaggaaaacgaggacattctggaagatatcgtgctgaccctgacactgtttgaggacagagagatgatcgaggaacggctgaaaacctatgcccacctgttcgacgacaaagtgatgaagcagctgaagcggcggagatacaccggctggggcaggctgagccggaagctgatcaacggcatccgggacaagcagtccggcaagacaatcctggatttcctgaagtccgacggcttcgccaacagaaacttcatgcagctgatccacgacgacagcctgacctttaaagaggacatccagaaagcccaggtgtccggccagggcgatagcctgcacgagcacattgccaatctggccggcagccccgccattaagaagggcatcctgcagacagtgaaggtggtggacgagctcgtgaaagtgatgggccggcacaagcccgagaacatcgtgatcgaaatggccagagagaaccagaccacccagaagggacagaagaacagccgcgagagaatgaagcggatcgaagagggcatcaaagagctgggcagccagatcctgaaagaacaccccgtggaaaacacccagctgcagaacgagaagctgtacctgtactacctgcagaatgggcgggatatgtacgtggaccaggaactggacatcaaccggctgtccgactacgatgtggaccatatcgtgcctcagagctttctgaaggacgactccatcgacaacaaggtgctgaccagaagcgacaagaaccggggcaagagcgacaacgtgccctccgaagaggtcgtgaagaagatgaagaactactggcggcagctgctgaacgccaagctgattacccagagaaagttcgacaatctgaccaaggccgagagaggcggcctgagcgaactggataaggccggcttcatcaagagacagctggtggaaacccggcagatcacaaagcacgtggcacagatcctggactcccggatgaacactaagtacgacgagaatgacaagctgatccgggaagtgaaagtgatcaccctgaagtccaagctggtgtccgatttccggaaggatttccagttttacaaagtgcgcgagatcaacaactaccaccacgcccacgacgcctacctgaacgccgtcgtgggaaccgccctgatcaaaaagtaccctaagctggaaagcgagttcgtgtacggcgactacaaggtgtacgacgtgcggaagatgatcgccaagagcgagcaggaaatcggcaaggctaccgccaagtacttcttctacagcaacatcatgaactttttcaagaccgagattaccctggccaacggcgagatccggaagcggcctctgatcgagacaaacggcgaaaccggggagatcgtgtgggataagggccgggattttgccaccgtgcggaaagtgctgagcatgccccaagtgaatatcgtgaaaaagaccgaggtgcagacaggcggcttcagcaaagagtctatcctgcccaagaggaacagcgataagctgatcgccagaaagaaggactgggaccctaagaagtacggcggcttcgacagccccaccgtggcctattctgtgctggtggtggccaaagtggaaaagggcaagtccaagaaactgaagagtgtgaaagagctgctggggatcaccatcatggaaagaagcagcttcgagaagaatcccatcgactttctggaagccaagggctacaaagaagtgaaaaaggacctgatcatcaagctgcctaagtactccctgttcgagctggaaaacggccggaagagaatgctggcctctgccggcgaactgcagaagggaaacgaactggccctgccctccaaatatgtgaacttcctgtacctggccagccactatgagaagctgaagggctcccccgaggataatgagcagaaacagctgtttgtggaacagcacaagcactacctggacgagatcatcgagcagatcagcgagttctccaagagagtgatcctggccgacgctaatctggacaaagtgctgtccgcctacaacaagcaccgggataagcccatcagagagcaggccgagaatatcatccacctgtttaccctgaccaatctgggagcccctgccgccttcaagtactttgacaccaccatcgaccggaagaggtacaccagcaccaaagaggtgctggacgccaccctgatccaccagagcatcaccggcctgtacgagacacggatcgacctgtctcagctgggaggtgacagcggcgggagcggcgggagcggggggagcactaatctgagcgacatcattgagaaggagactgggaaacagctggtcattcaggagtccatcctgatgctgcctgaggaggtggaggaagtgatcggcaacaagccagagtctgacatcctggtgcacaccgcctacgacgagtccacagatgagaatgtgatgctgctgacctctgacgcccccgagtataagccttgggccctggtcatccaggattctaacggcgagaataagatcaagatgctgagcggaggatccggaggatctggaggcagcaccaacctgtctgacatcatcgagaaggagacaggcaagcagctggtcatccaggagagcatcctgatgctgcccgaagaagtcgaagaagtgatcggaaacaagcctgagagcgatatcctggtccataccgcctacgacgagagtaccgacgaaaatgtgatgctgctgacatccgacgccccagagtataagccctgggctctggtcatccaggattccaacggagagaacaaaatcaaaatgctgtctggcggctcaaaaagaaccgccgacggcagcgaattcgagcccaagaagaagaggaaagtc

SEQ ID NO: 619 - protein, 228 aa, synthetic construct
SSETGPVAVDPTLRRRIEPHEFEVFFDPRELRKETCLLYEINWGGRHSIWRHTSQNTNKHVEVNFIEKFTTERYFCPNTRCSITWFLSWSPCGECSRAITEFLSRYPHVTLFIYIARLYHHADPRNRQGLRDLISSGVTIQIMTEQESGYCWRNFVNYSPSNEAHWPRYPHLWVRLYVLELYCIILGLPPCLNILRRKQPQLTFFTIALQSCHYQRLPPHILWATGLK

SEQ ID NO: 620 - protein, 228 aa, synthetic construct
SSETGPVAVDPTLRRRIEPEFFNRNYDPRELRKETYLLYEIKWGKESKIWRHTSNNRTQHAEVNFLENFFNELYFNPSTHCSITWFLSWSPCGECSKAIVEFLKEHPNVNLEIYVARLYLCEDERNRQGLRDLVNSGVTIRIMNLPDYNYCWRTFVSHQGGDEDYWPRHFAPWVRLYVLELYCIILGLPPCLNILRRKQPQLTFFTIALQSCHYQRLPPHILWATGLK

SEQ ID NO: 621 - protein, 384 aa, synthetic construct
MKPHFRNTVERMYRDTFSYNFYNRPILSRRNTVWLCYEVKTKGPSRPPLDAKIFRGQVYSELKYHPEMRFFHWFSKWRKLHRDQEYEVTWYISWSPCTKCTRDMATFLAEDPKVTLTIFVARLYYFWDPDYQEALRSLCQKRDGPRATMKIMNYDEFQHCWSKFVYSQRELFEPWNNLPKYYILLHIMLGEILRHSMDPPTFTFNFNNEPWVRGRHETYLCYEVERMHNDTWVLLNQRRGFLCNQAPHKHGFLEGRHAELCFLDVIPFWKLDLDQDYRVTCFTSWSPCFSCAQEMAKFISKNKHVSLCIFTARIYRRQGRCQEGLRTLAEAGAKISIMTYSEFKHCWDTFVDHQGCPFQPWDGLDEHSQDLSGRLRAILQNQEN

SEQ ID NO: 622 - protein, 184 aa, synthetic construct
MDPPTFTFNFNNEPWVRGRHETYLCYEVERMHNDTWVLLNQRRGFLCNQAPHKHGFLEGRHAELCFLDVIPFWKLDLDQDYRVTCFTSWSPCFSCAQEMAKFISKNKHVSLCIFTARIYDDQGRCQEGLRTLAEAGAKISIMTYSEFKHCWDTFVDHQGCPFQPWDGLDEHSQDLSGRLRAILQ

SEQ ID NO: 623 - protein, 184 aa, synthetic construct
MDPPTFTFNFNNEPWVRGRHETYLCYEVERMHNDTWVLLNQRRGFLCNQAPHKHGFLEGRHAELCFLDVIPFWKLDLDQDYRVTCFTSWSPCFSCAQEMAKFISKNKHVSLCIFTARIYRRQGRCQEGLRTLAEAGAKISIMTYSEFKHCWDTFVDHQGCPFQPWDGLDEHSQDLSGRLRAILQ

SEQ ID NO: 624 - protein, 428 aa, Mus sp.
MGPFCLGCSHRKCYSPIRNLISQETFKFHFKNLGYAKGRKDTFLCYEVYRKOCOSPVSLHHGVFKNKONIHAEICFLYWFHDKVLKVLSPREEFKITWYMSWSPCFECAEQIVRFLATHHNLSLDIFSSRLYNVQDPETQQNLCRLVQEGAQVAAMDLYEFKKCWKKFVDNGGRRFRPWKRLLTNFRYQDSKLQEILRPCYIPVPSSSSSTLSNICLTKGLPETRFCVEGRRMDPLSEEEFYSQFYNQRVKHLCYYHRMKPYLCYQLEQFNGQAPLKGCLLSEKGKQHAEILFLDKIRSMELSQVTITCYLTWSPCPNCAWQLAAFKRORPOULHIATSRLYFHWKRPFQKGLCSLWQSGILVDVMDLPQFTDCWTNFVNPKRPFWPWKGLEIISRRTQRRLRRIKESWGLQDLVNDFGNLQLGPPMS

SEQ ID NO: 625 - protein, 429 aa, Rattus sp.
MGPFCLGCSHRKCYSPIRNLISQETFKFHFKNLRYAIDRKDTFLCYEVTRKDCDSPVSLHHGVFKNKDNIHAEICFLYWFHDKVLKVLSPREEFKITWYMSWSPCFECAEQVLRFLATHHNLSLDIFSSRLYNIRDPENQQNLCRLVQEGAQVAAMDLYEFKKCWKKFVDNGGRRFRPWKKLLTNFRYQDSKLQEILRPCYIPVPSSSSSTLSNICLTKGLPETRFCVERRRVHLLSEEEFYSQFYNQRVKHLCYYHGVKPYLCYQLEQFNGQAPLKGCLLSEKGKQHAEILFLDKIRSMELSQVIITCYLTWSPCPNCAWQLAAFKRDRPDLILHIYTSRLYFHWKRPFQKGLCSLWQSGILVDVMDLPQFTDCWTNFVNPKRPFWPWKGLEIISRRTQRRLHRIKESWGLQDLVNDFGNLQLGPPMS

SEQ ID NO: 626 - protein, 370 aa, Macaca mulatta; identical to SEQ ID NO: 33

SEQ ID NO: 627 - protein, 384 aa, Pan troglodytes; identical to SEQ ID NO: 34

SEQ ID NO: 628 - protein, 377 aa, Chlorocebus sabaeus; identical to SEQ ID NO: 35

SEQ ID NO: 629 - protein, 384 aa, Homo sapiens; identical to SEQ ID NO: 36

SEQ ID NO: 630 - protein, 373 aa, Homo sapiens; identical to SEQ ID NO: 32

SEQ ID NO: 631 - protein, 382 aa, Homo sapiens; identical to SEQ ID NO: 37

SEQ ID NO: 632 - protein, 396 aa, Rattus sp.
MQPQGLGPNAGMGPVCLGCSHRRPYSPIRNPLKKLYQQTFYFHFKNVRYAWGRKNNFLCYEVNGMDCALPVPLRQGVFRKQGHIHAELCFIYWFHDKVLRVLSPMEEFKVTWYMSWSPCSKCAEQVARFLAAHRNLSLAIFSSRLYYYLRNPNYQQKLCRLIQEGVHVAAMDLPEFKKCWNKFVDNDGQPFRPWMRLRINFSFYDCKLQEIFSRMNLLREDVFYLQFNNSHRVKPVQNRYYRRKSYLCYQLERANGQEPLKGYLLYKKGEQHVEILFLEKMRSMELSQVRITCYLTWSPCPNCARQLAAFKKDHPDLILRIYTSRLYFYWRKKFQKGLCTLWRSGIHVDVMDLPQFADCWTNFVNPQRPFRPWNELEKNSWRIQRRLRRIKESWGL

SEQ ID NO: 633 - protein, 227 aa, Bos sp.
DGWEVAFRSGTVLKAGVLGVSMTEGWAGSGHPGQGACVWTPGTRNTMNLLREVLFKQQFGNQPRVPAPYYRRKTYLCYQLKQRNDLTLDRGCFRNKKQRHAEIRFIDKINSLDLNPSQSYKIICYITWSPCPNCANELVNFITRNNHLKLEIFASRLYFHWIKSFKMGLQDLQNAGISVAVMTHTEFEDCWEQFVDNQSRPFQPWDKLEQYSASIRRRLQRILTAPI

SEQ ID NO: 634 - protein, 490 aa, Pan troglodytes; identical to SEQ ID NO: 40

SEQ ID NO: 635 - protein, 190 aa, Gorilla sp.
MNPQIRNPMKAMYPGTFYFQFKNLWEANDRNETWLCFTVEGIKRRSVVSWKTGVFRNQVDSETHCHAERCFLSWFCDDILSPNTNYQVTWYTSWSPCPECAGEVAEFLARHSNVNLTIFTARLYYFQDTDYQEGLRSLSQEGVAVKIMDYKDFKYCWENFVYNDDEPFKPWKGLKYNFRFLKRRLQEILE

SEQ ID NO: 636 - protein, 199 aa, Homo sapiens
MEASPASGPRHLMDPHIFTSNFNNGIGRHKTYLCYEVERLDNGTSVKMOQHRGEEHNQAKNEECGEAGRHAELRFLDLVPSLQLDPAQIYRVTWFISWSPCFSWGCAGEVRAFLQENTHVRLRIFAARIYDYDPLYKEALQMLRDAGAQVSIMTYDEFKHCWDTFVDHQGCPFQPWDGLDEHSQALSGRLRAILQNQGN

SEQ ID NO: 637 - protein, 202 aa, Macaca mulatta
MDGSPASRPRHLMDPNTFTFNFNNDLSVRGRHQTYLCYEVERLDNGTWVPMDERRGEECNKAKNNPCGOAGCHVELRFLCEVPSWQLDPAQTYRVTWFISWSPCERRGCAGQVRVFLQENKHVRLRIFAARIYDYDPLYQEALRTLRDAGAQVSIMTYEEFKHCWDTFVDRQGRPFQPWDGLDEHSQALSGRLRAILQNQGN

SEQ ID NO: 638 - protein, 184 aa, Bos sp.
MDEYTFTENFNNQGWPSKTYLCYEMERLDGDATIPLDEYKGFVRNKGLDQPEKPCAELYFLGKIHSWNLDRNQHYRLTCFISWSPCAOCAQKEEEEEKENHHISUIIEASRIAEHNRFGCHQSGLCELQAAGARITIMTFEDFKHCWETFVDHKGKPFQPWEGLNVKSQALCTELQAILKTQQN

SEQ ID NO: 639 - protein, 201 aa, Homo sapiens
MALLTAETFRLQFNNKRRLRRPYYPRKALLCYQLTPQNGSTPTRGYFENKKKCHAEICFINEIKSMGLDETQCYQVTCYLTYVSPCSSCAWEENOEIKAHOHENEGIEASRLYYHWCKPQQKGLRLLCGSQVPVEVMGFPKFADCWENFVDHEKPLSFNPYKMLEELDKNSRAIKRRLERIKIPGVRAQGRYMDILCDAEV

SEQ ID NO: 640 - protein, 380 aa, Homo sapiens
MNPQIRNPMERMYRDTFYDNFENEPILYGRSYTWLCYEVKIKRGRSNEEWDEGNERGPNEPKRQSNHRQENYERFENHAEMCFLSWFCGNRLPANRRFQITWFVSWPCLPCVVKVTKFLAEHPNVTLTISAARLYYYRDRDWRWVLLRLHKAGARVKIMDYEDFAYCWENFVCNEGQPFMPWYKFDDNYASLHRTLKEILRNPMEAMYPHIFYFHFKNLLKACGRNESWLCFTMEVTKHHSAVFRKRGVFRNQVDPETHCAEPCFLSWFCDDLSPIYPVFEMMWSPCPECAGEVAEFLARHSNVNLTIFTARLCYFWDTDYQEGLCSLSQEGASVKIMGYKDFVSCWKNFVYSDDEPFKPWKGLQTNFRLLKRRLREILQ

SEQ ID NO: 641 - protein, 228 aa, Rattus sp.
SSETGPVAVDPTLRRRIEPHEFEVFFDPRELRKETCLLYEINWGGRHSIWRHTSQNTNKHVEVNFIEKFTTERYFCPNTRCSRRWFLSWSPCGECSRAITEFLSRYPHVTLFIYIARLYHHADPRNRQGLRDLISSGVTIQIMTEQESGYCWRNFVNYSPSNEAHWPRYPHLWVRLYVLELYCIILGLPPCLNILRRKQPQLTFFTIALQSCHYQRLPPHILWATGLK

SEQ ID NO: 642 - protein, 228 aa, synthetic construct
SSETGPVAVDPTLRRRIEPHEFEVFFDPRELRKETCLLYEIKWGTSHKIWRHSSKNTTKHVEVNFIEKFTSERHFCPSTSCSITWFLSWSPCGECSKAITEFLSQHPNVTLVIYVARLYHHMDQQNRQGLRDLVNSGVTIQIMTAPEYDYCWRNFVNYPPGKEAHWPRYPPLWMKLYALELHAGILGLPPCLNILRRKQPQLTFFTIALQSCHYQRLPPHILWATGLK

SEQ ID NO: 643 - protein, 228 aa, synthetic construct
SSETGPVAVDPTLRRRIEPHEFEVFFDPRELRKEACLLYEIKWGTSHKIWRNSGKNTTKHVEVNFIEKFTSERHFCPSISCSITWFLSWSPCWECSKAIREFLSQHPNVTLVIYVARLFQHMDQQNRQGLRDLVNSGVTIQIMTASEYDHCWRNFVNYPPGKEAHWPRYPPLWMKLYALELHAGILGLPPCLNILRRKQPQLTFFTIALQSCHYQRLPPHILWATGLK

SEQ ID NO: 644 - protein, 228 aa, synthetic construct
SSETGPVAVDPTLRRRIEPEFFNRNYDPRELRKETYLLYEIKWGKESKIWRHTSNNRTQHAEVNFLENFFNELYFNPSTHCSRRWFLSWSPCGECSKAIVEFLKEHPNVNLEIYVARLYLCEDERNRQGLRDLVNSGVTIRIMNLPDYNYCWRTFVSHQGGDEDYWPRHFAPWVRLYVLELYCIILGLPPCLNILRRKQPQLTFFTIALQSCHYQRLPPHILWATGLK

SEQ ID NO: 645 - protein, 228 aa, synthetic construct
SSETGPVAVDPTLRRRIEPFYFQFNNDPRACRRKTYLCYELKQDGSTWVWKRTLHNKGRHAEICFLEKISSLEKLDPAQHYRITWYMSWSPCSNCAQKIVDFLKEHPHVNLRIYVARLYYHEEERYQEGLRNLRRSGVSIRVMDLPDFEHCWETFVDNGGGPFQPWPGLEELNSKQLSRRLQAGILGLPPCLNILRRKQPQLTFFTIALQSCHYQRLPPHILWATGLK

SEQ ID NO: 646 - protein, 228 aa, synthetic construct
SSETGPVAVDPTLRRRIEPFHFQFNNDPRAYRRKTYLCYELKQDGSTWVLDRTLRNKGRHAEICFLDKINSWERLDPAQHYRVTWYMSWSPCSNCAQQVVDFLKEHPHVNLRIFAARLYYHEQRRYQEGLRSLRGSGVPVAVMTLPDFEHCWETFVDHGGRPFQPWDGLEELNSRSLSRRLQAGILGLPPCLNILRRKQPQLTFFTIALQSCHYQRLPPHILWATGLK

SEQ ID NO: 647 - protein, 12 aa, synthetic construct
EGSSSKEEEEPG

SEQ ID NO: 648 - protein, 10 aa, synthetic construct
NSISSSNGQK

SEQ ID NO: 649 - protein, 12 aa, synthetic construct
GEEGEGSGGGEK

SEQ ID NO: 650 - protein, 12 aa, synthetic construct
EGEGGKESGSSE

SEQ ID NO: 651 - protein, 12 aa, synthetic construct
GGGGSSKSPGSE

SEQ ID NO: 652 - protein, 8 aa, synthetic construct
PIGSDQDD

SEQ ID NO: 653 - protein, 10 aa, synthetic construct
TEKGQVPHGS

SEQ ID NO: 654 - protein, 12 aa, synthetic construct
ESGEGGGGSEKK

SEQ ID NO: 655 - protein, 12 aa, synthetic construct
EEGKPKEGEGSG

SEQ ID NO: 656 - protein, 9 aa, synthetic construct
ASREPKDSS

SEQ ID NO: 657 - protein, 8 aa, synthetic construct
KQGSEHDE

SEQ ID NO: 658 - protein, 12 aa, synthetic construct
SESKSEKGSSEK

SEQ ID NO: 659 - protein, 10 aa, synthetic construct
QYDSGERSDQ

SEQ ID NO: 660 - protein, 10 aa, synthetic construct
PGANEEIPGQ

SEQ ID NO: 661 - protein, 7 aa, synthetic construct
NSPTDEK

SEQ ID NO: 662 - protein, 10 aa, synthetic construct
EGANEEIPGQ

SEQ ID NO: 663 - protein, 12 aa, synthetic construct
EGEKEKKKSGES

SEQ ID NO: 664 - protein, 10 aa, synthetic construct
PGRHEEVPGQ

SEQ ID NO: 665 - protein, 10 aa, synthetic construct
SKHQTEQDDS

SEQ ID NO: 666 - protein, 10 aa, synthetic construct
ESEDDSSGRK

SEQ ID NO: 667 - protein, 12 aa, synthetic construct
KESEKKESESKS

SEQ ID NO: 668 - protein, 10 aa, synthetic construct
KGEGKSSIKD

SEQ ID NO: 669 - protein, 10 aa, synthetic construct
DRSQKQDQQD

SEQ ID NO: 670 - protein, 8 aa, synthetic construct
GPSSTSSS

SEQ ID NO: 671 - protein, 12 aa, synthetic construct
GSSGEKEEGEPS

SEQ ID NO: 672 - protein, 12 aa, synthetic construct
GEPKSKKSGSGS

SEQ ID NO: 673 - protein, 12 aa, synthetic construct
SSGEGGKSESGP

SEQ ID NO: 674 - protein, 8 aa, synthetic construct
SPQPTSSD

SEQ ID NO: 675 - protein, 12 aa, synthetic construct
EGGSEEEEESGS

SEQ ID NO: 676 - protein, 12 aa, synthetic construct
KGPKPKKEESEK

SEQ ID NO: 677 - protein, 10 aa, synthetic construct
SKSQQFVTYE

SEQ ID NO: 678 - protein, 10 aa, synthetic construct
TGNSKYQTGK

SEQ ID NO: 679 - protein, 10 aa, synthetic construct
PQPIPHTNPT

SEQ ID NO: 680 - protein, 10 aa, synthetic construct
ANAHSDISTG

SEQ ID NO: 681 - protein, 10 aa, synthetic construct
KSQQTEDQSK

SEQ ID NO: 682 - protein, 10 aa, synthetic construct
QSQDQKQKEH

SEQ ID NO: 683 - protein, 8 aa, synthetic construct
NQQRPSSD

SEQ ID NO: 684 - protein, 10 aa, synthetic construct
TTKDTSPKPQ

SEQ ID NO: 685 - protein, 10 aa, synthetic construct
EGKDNQQTGE

SEQ ID NO: 686 - protein, 8 aa, synthetic construct
EPQPDSSE

SEQ ID NO: 687 - protein, 4 aa, synthetic construct
GSSG

SEQ ID NO: 688 - protein, 4 aa, synthetic construct
SEQE

SEQ ID NO: 689 - protein, 8 aa, synthetic construct
ITLANGEI

SEQ ID NO: 690 - protein, 4 aa, synthetic construct
LANG

SEQ ID NO: 691 - protein, 166 aa, synthetic construct
SEVEFSHEYWMRHALTLAKRARDEREVPVGAVLVLNNRVIGEGWNRAIGLHDPTAHAEIMALRQGGLVMQNYRLIDATLYVTFEPCVMCAGAMIHSRIGRVVFGVRNAKTGAAGSLMDVLHYPGMNHRVEITEGILADECAALLCYFFRMPRQVFNAQKKAQSSTD

SEQ ID NO: 692 - protein, 10 aa, synthetic construct
AAAAAAAAAA